(19) United States
(12) Patent Application Publication
(10) Pub. No.: US 2025/0375537 A1
(43) Pub. Date: Dec. 11, 2025

(54) Systems and Methods for Genomic Editing

(71) Applicant: Intellia Therapeutics, Inc., Cambridge, MA (US)

(72) Inventors: Sabin Mulepati, Somerville, MA (US); Christian Dombrowski, Auburndale, MA (US); Jennifer Lauren Curran, Cambridge, MA (US)

(73) Assignee: Intellia Therapeutics, Inc., Cambridge, MA (US)

(21) Appl. No.: 19/241,998

(22) Filed: Jun. 18, 2025

Related U.S. Application Data
(63) Continuation of application No. PCT/US2023/085661, filed on Dec. 22, 2023.
(60) Provisional application No. 63/477,093, filed on Dec. 23, 2022.

(51) Int. Cl. A61K 48/00; C12N 9/22; C12N 15/11; C12N 15/88; C12N 15/90

(52) U.S. Cl. CPC A61K 48/0058; A61K 48/0041; C12N 9/226; C12N 15/11; C12N 15/88; C12N 15/907; C12N 2310/20

(57) ABSTRACT

Methods and compositions for genetically modifying a cell are provided.

### CROSS-REFERENCE TO RELATED APPLICATION

[0001] This application is a continuation of International Application No. PCT/US2023/085661, filed Dec. 22, 2023, which claims the benefit of priority to U.S. Provisional Application No. 63/477,093, filed Dec. 23, 2022, both of which are herein incorporated by reference in their entirety.

### REFERENCE TO ELECTRONIC SEQUENCE LISTING

[0002] The application contains a Sequence Listing which has been submitted electronically in .XML format and is hereby incorporated by reference in its entirety. Said .XML copy, created on Mar. 12, 2024, is named “01155-0056-00US.xml” and is 1,645,487 bytes in size. The sequence listing contained in this .XML file is part of the specification and is hereby incorporated by reference herein in its entirety.

### INTRODUCTION AND SUMMARY

[0003] The present disclosure relates to methods, compositions, and systems for genomic editing.

[0004] The ability to introduce precise and reproducible deletions into the genome of a cell is of interest for gene editing and clinical therapeutic applications. For example, adoptive cell therapy approaches using genetically modified immune cells have become an attractive modality to treat a variety of conditions and diseases, including cancers, to reconstitute cell lineages and immune system defense. However, the clinical application of cell product therapies has been challenging in part due to the complex genetic engineering requirements. The ability to precisely excise genetic elements, including start codons, splice sites, and transcription factor binding sites, while minimizing the risk of off-target cleavage and locus inversions, is thus of great interest to the field of genetic engineering.

[0005] CRISPR/Cas9 genome editing has been demonstrated to be highly efficient; however, it has been challenging to generate precise deletions. Double strand breaks (DSBs) may be repaired via the error-prone non-homologous end-joining (NHEJ) pathway, generating small insertions or deletions around a break site. While this process may therefore generate a deletion around the site of a DSB, the size of this deletion may vary considerably on a cell-to-cell and even allele-to-allele basis. Thus, there is a need for a more efficient approach for generating precise and reproducible deletions within the genome of a cell.

[0006] The methods provided herein comprise using an orthogonal Cas9-Cas9 fusion system for precise genome editing applications, providing substantial advantages over traditional methods.

[0007] Accordingly, the present disclosure provides a method of producing a modification in the genome of a target cell, the method comprising contacting the cell with: (a) a fusion protein, or a nucleic acid encoding a fusion protein, wherein the fusion protein comprises a first cleavase and a second cleavase, wherein the first cleavase is a Streptococcus pyogenes (Spy)Cas9 cleavase, said SpyCas9 cleavase comprising a R1333K mutation within its protospacer adjacent motif recognition domain; and the second cleavase is a Neisseria meningitidis (Nme)Cas9 cleavase, a Campylobacter jejuni (Cje) Cas9 cleavase, or a Simonsiella muelleri (Smu) Cas9 cleavase; and (b) a first guide RNA that directs the first cleavase to a first genomic locus; and (c) a second guide RNA that directs the second cleavase to a second genomic locus, wherein the second genomic locus is different from the first genomic locus.

[0008] In some embodiments, a method of producing a cell or a population of cells comprising a modification in the genome of the target cell or cells is provided. In some embodiments, the method comprises contacting the cell with: (a) a fusion protein, or a nucleic acid encoding a fusion protein, wherein the fusion protein comprises a first cleavase and a second cleavase, wherein the first cleavase is a SpyCas9 cleavase, said SpyCas9 cleavase comprising a R1333K mutation within its protospacer adjacent motif recognition domain; and the second cleavase is a NmeCas9 cleavase, a Cje Cas9 cleavase, or a Smu Cas9 cleavase; and (b) a first guide RNA that directs the first cleavase to a first genomic locus; and (c) a second guide RNA that directs the second cleavase to a second genomic locus, wherein the second genomic locus is different from the first genomic locus.

[0009] In some embodiments, a polynucleotide is provided, comprising an open reading frame (ORF) encoding a fusion protein, wherein the fusion protein comprises a first cleavase and a second cleavase, wherein: the first cleavase is a S. pyogenes (Spy)Cas9 cleavase, said SpyCas9 cleavase comprising a R1333K mutation within its protospacer adjacent motif recognition domain; and the second cleavase is a NmeCas9 cleavase, a Cje Cas9 cleavase, or a Smu Cas9 cleavase.

[0010] In some embodiments, a composition is provided.

[0011] In some embodiments, the composition comprises (a) a polynucleotide comprising an open reading frame (ORF) encoding a fusion protein, wherein the fusion protein comprises a first cleavase and a second cleavase, wherein: the first cleavase is a S. pyogenes (Spy)Cas9 cleavase, said SpyCas9 cleavase comprising a R1333K mutation within its protospacer adjacent motif recognition domain; and the second cleavase is a NmeCas9 cleavase, a Cje Cas9 cleavase, or a Smu Cas9 cleavase; and (b) a first guide RNA that directs the first cleavase to a first genomic locus; and (c) a second guide RNA that directs the second cleavase to a second genomic locus, wherein the second genomic locus is different from the first genomic locus.

[0012] The following is a non-exhaustive listing of embodiments provided herein.

[0013] Embodiment 1 is a method of producing a modification in the genome of a target cell, the method comprising contacting the cell with:
[0014] (a) a fusion protein, or a nucleic acid encoding a fusion protein, wherein the fusion protein comprises a first cleavase and a second cleavase, wherein:
   [0015] a. the first cleavase is a Streptococcus pyogenes (Spy)Cas9 cleavase, said SpyCas9 cleavase comprising a R1333K mutation within its protospacer adjacent motif recognition domain; and
   [0016] b. the second cleavase is a Neisseria meningitidis (Nme)Cas9 cleavase, a Campylobacter jejuni (Cje) Cas9 cleavase, or a Simonsiella muelleri (Smu) Cas9 cleavase; and
[0017] (b) a first guide RNA that directs the first cleavase to a first genomic locus; and
[0018] (c) a second guide RNA that directs the second cleavase to a second genomic locus,
[0019] wherein the second genomic locus is different from the first genomic locus.

[0020] Embodiment 2 is a method of producing a cell or a population of cells comprising a modification in the genome of the target cell or cells, the method comprising contacting the cell or cells with:
[0021] (a) a fusion protein, or a nucleic acid encoding a fusion protein, wherein the fusion protein comprises a first cleavase and a second cleavase, wherein:
   [0022] a. the first cleavase is a S. pyogenes (Spy)Cas9 cleavase, said SpyCas9 cleavase comprising a R1333K mutation within its protospacer adjacent motif recognition domain; and
   [0023] b. the second cleavase is a N. meningitidis (Nme)Cas9 cleavase, a C. jejuni (Cje)Cas9 cleavase, or a S. muelleri (Smu)Cas9 cleavase; and
[0024] (b) a first guide RNA that directs the first cleavase to a first genomic locus; and
[0025] (c) a second guide RNA that directs the second cleavase to a second genomic locus,
[0026] wherein the second genomic locus is different from the first genomic locus.

[0027] Embodiment 3 is the method of any one of Embodiment 1 or 2, wherein the first cleavase is located N-terminal to the second cleavase.

[0028] Embodiment 4 is the method of any one of Embodiment 1 or 2, wherein the first cleavase is located C-terminal to the second cleavase.

[0029] Embodiment 5 is the method of any one of the preceding Embodiments, wherein (i) the SpyCas9 cleavase comprises an amino acid sequence of SEQ ID NO: 105 or an amino acid sequence that is at least 85%, at least 90%, or at least 95% identical to SEQ ID NO: 105; or (ii) the nucleotide encoding the SpyCas9 cleavase comprises an open reading frame (ORF) comprising a sequence of SEQ ID NO: 104 or a nucleotide sequence that is at least 85, at least 90%, or at least 95% identical to SEQ ID NO: 104.

[0030] Embodiment 6 is the method of any one of the preceding Embodiments, wherein the second cleavase is a NmeCas9 cleavase.

[0031] Embodiment 7 is the method of any one of the preceding Embodiments, wherein the NmeCas9 cleavase is an Nme1Cas9, an Nme2Cas9, or an Nme3Cas9.

[0032] Embodiment 8 is the method of any one of the preceding Embodiments, wherein (i) the NmeCas9 cleavase comprises an amino acid sequence of any one of SEQ ID NO: 22, 107, 109, 120, 127, 136, or 137 or an amino acid sequence that is at least 85%, at least 90%, or at least 95% identical to any one of SEQ ID NO: 22, 107, 109, 120, 127, 136, or 137; or (ii) the nucleotide encoding the NmeCas9 cleavase comprises a nucleotide sequence of any one of SEQ ID NO: 21, 106, 108, 121-126, 128-133, 134, 135, 138, or 139; or a nucleotide sequence that is at least 85%, at least 90%, or at least 95% identical to any one of SEQ ID NO: SEQ ID NO: 21, 106, 108, 121-126, 128-133, 134, 135, 138, or 139.

[0033] Embodiment 9 is the method of any one of the preceding Embodiments, wherein (a) the NmeCas9 cleavase is a Nme2Cas9 comprises an amino acid sequence of any one of SEQ ID NO: 22, 109, or 136 or an amino acid sequence that is at least 85%, at least 90%, at least 95% identical to any one of SEQ ID NO: 22, 109, or 136; or (b) the nucleotide encoding the NmeCas9 cleavase comprises a nucleotide sequence of any one of SEQ ID NO: 21, 108, or 138; or a nucleotide sequence that is at least 85%, at least 90%, or at least 95% identical to any one of SEQ ID NO: SEQ ID NO: 21, 108, or 138.

[0034] Embodiment 10 is the method of any one of the preceding Embodiments, wherein (a) the CjeCas9 cleavase comprises an amino acid sequence of SEQ ID NO: 144; or an amino acid sequence that is at least 85%, at least 90%, or at least 95% identical to SEQ ID NO: 144; or (b) the nucleotide encoding the CjeCas9 cleavase comprises a sequence of SEQ ID NO: 143 or a nucleotide sequence that is at least 85%, at least 90%, or at least 95% identical to SEQ ID NO: 143.

[0035] Embodiment 11 is the method of any one of the preceding Embodiments, wherein (a) the SmuCas9 cleavase comprises an amino acid sequence of SEQ ID NO: 142; or an amino acid sequence that is at least 85%, at least 90%, or at least 95% identical to SEQ ID NO: 142; or (b) the nucleotide encoding the SmuCas9 cleavase comprises an open reading frame (ORF) comprising a sequence of SEQ ID NO: 140 or 141 or a nucleotide sequence that is at least 85%, at least 90%, or at least 95% identical to SEQ ID NO: 140 or 141.

[0036] Embodiment 12 is the method of any one of the preceding Embodiments, wherein the fusion protein comprises a peptide linker between the first cleavase and the second cleavase.

[0037] Embodiment 13 is the method of any one of the preceding Embodiments, wherein the fusion protein comprises a peptide linker between the first cleavase and the second cleavase and the peptide linker comprises at least 10, at least 20, at least 30, at least 40, at least 50, at least 60, at least 70, at least 80 amino acids.

[0038] Embodiment 14 is the method of any one of the preceding Embodiments, wherein the fusion protein comprises a peptide linker between the first cleavase and the second cleavase and the peptide linker comprises 11, 21, 31, 41, 51, 61, 71, or 81 amino acid residues.

[0039] Embodiment 15 is the method of any one of the preceding Embodiments, wherein the fusion protein comprises a peptide linker between the first cleavase and the second cleavase and the peptide linker comprises an amino acid sequence of any one of SEQ ID NOs: 150-158; or an amino acid sequence is at least 85%, at least 90%, or at least 95% identical to any one of SEQ ID NOs: 150-158.

[0040] Embodiment 16 is the method of any one of the preceding Embodiments, wherein the fusion protein comprises a nuclear localization signal (NLS).

[0041] Embodiment 17 is the method of any one of the preceding Embodiments, wherein the fusion protein comprises a nuclear localization signal (NLS) and the NLS is present at the C-terminus of the fusion protein.

[0042] Embodiment 18 is the method of any one of the preceding Embodiments, wherein the fusion protein comprises a nuclear localization signal (NLS) and the NLS is present at the N-terminus of the fusion protein.

[0043] Embodiment 19 is the method of any one of the preceding Embodiments, wherein the fusion protein comprises a nuclear localization signal (NLS) and the NLS is present at both the N-terminus and C-terminus of the fusion protein.

[0044] Embodiment 20 is the method of any one of the preceding Embodiments, wherein the fusion protein comprises a nuclear localization signal (NLS), and wherein the NLS comprises a sequence having at least 80%, at least 85%, at least 90%, or at least 95% identity to any one of SEQ ID NOs: 366-369 and 371-384.

[0045] Embodiment 21 is the method of any one of the preceding Embodiments, wherein the fusion protein comprises a nuclear localization signal (NLS), and wherein the NLS is encoded by a sequence having at least 80%, at least 85%, at least 90%, at least 95%, at least 98% or 100% identity to the sequence of any one of SEQ ID NOs: 370 and 385-397.

[0046] Embodiment 22 is the method of any one of the preceding Embodiments, wherein the fusion protein comprises one, two, or three nuclear localization signals (NLSs) independently selected from SEQ ID NOs: 366-369 and 371-384.

[0047] Embodiment 23 is the method of any one of the preceding Embodiments, wherein the fusion protein comprises, from N-terminus to C-terminus:
[0048] a. the first cleavase;
[0049] b. a peptide linker, optionally wherein the linker comprises 81 amino acid residues;
[0050] c. the second cleavase; and
[0051] d. an NLS comprising an SV40 NLS.

[0052] Embodiment 24 is the method of any one of Embodiments 1-22, wherein the fusion protein comprises, from N-terminus to C-terminus:
[0053] a. a first NLS, wherein the first NLS comprises an SV40 NLS;
[0054] b. the second cleavase;
[0055] c. a peptide linker, optionally wherein the peptide linker comprises 41 amino acids;
[0056] d. the first cleavase;
[0057] e. a second NLS, wherein the second NLS comprising an SV40 NLS.

[0058] Embodiment 25 is the method of any one of Embodiments 1-22, wherein the fusion protein comprises, from N-terminus to C-terminus:
[0059] a. the second cleavase;
[0060] b. a peptide linker, optionally wherein the peptide linker comprises 41 amino acids;
[0061] c. the first cleavase; and
[0062] d. an NLS, optionally wherein the NLS comprises an SV40 NLS.

[0063] Embodiment 26 is the method of any one of the preceding Embodiments, wherein
[0064] (a) the fusion protein comprise an amino acid sequence of SEQ ID NOs: 3, 5, 7, 10, 13, 16, 40, 43, 45, 47, 50, 52, 55, 57, 60, 62, 65, 67, 70, 72, 75, 77, 80, 82, 85, 87, 90, 92, 101, or 105, or an amino acid sequence that is at least 90%, or at least 95% identical to SEQ ID NO: 3, or an amino acid sequence that is at least 85%, at least 90%, or at least 95%% identical to an amino acid sequence of SEQ ID NOs: 5, 7, 10, 13, 16, 40, 43, 45, 47, 50, 52, 55, 57, 60, 62, 65, 67, 70, 72, 75, 77, 80, 82, 85, 87, 90, 92, 101, or 105; or
[0065] (b) the nucleic acid encoding the fusion protein comprises a nucleotide sequence of SEQ ID NOs: 1-2, 4, 6, 8, 9, 11, 12, 14-15, 38-39, 41-42, 44, 46, 48-49, 51, 53, 54, 56, 58, 59, 61, 63, 64, 66, 68, 69, 71, 73, 74, 76, 78, 79, 81, 83, 84, 86, 88, 89, 91, 100, or 104, or a nucleotide sequence that is at least 90%, or at least 95% identical to SEQ ID NO: 1 or 2, or a nucleotide sequence that is at least 85%, at least 90%, or at least 95% identical to SEQ ID NO: 4, 6, 8, 9, 11, 12, 14-15, 38-39, 41-42, 44, 46, 48-49, 51, 53, 54, 56, 58, 59, 61, 63, 64, 66, 68, 69, 71, 73, 74, 76, 78, 79, 81, 83, 84, 86, 88, 89, 91, 100, or 104.

[0066] Embodiment 27 is the method of any one of the preceding Embodiments, wherein
[0067] (a) the fusion protein comprise an amino acid sequence of SEQ ID NOs: 3, 5, 7, 10, or 13, or an amino acid sequence that is at least 90%, or at least 95% identical to SEQ ID NO: 3, or an amino acid sequence that is at least 85%, at least 90%, or at least 95%% identical to an amino acid sequence of SEQ ID NOs: 5, 7, 10, or 13; or
[0068] (b) the nucleic acid encoding the fusion protein comprises a nucleotide sequence of SEQ ID NOs: 1, 2, 4, 6, 8, 9, 11 or 12, or a nucleotide sequence that is at least 90%, or at least 95% identical to SEQ ID NO: 1 or 2, or a nucleotide sequence that is at least 85%, at least 90%, or at least 95% identical to SEQ ID NO: 4, 6, 8, 9, 11 or 12.

[0069] Embodiment 28 is the method of any one of the preceding Embodiments, wherein
[0070] (a) the fusion protein comprise an amino acid sequence of SEQ ID NOs: 5 or 9 or n amino acid sequence that is at least 85%, at least 90%, or at least 95%% identical to an amino acid sequence of SEQ ID NOs: 5 or 99; or
[0071] (b) the nucleic acid encoding the fusion protein comprises a nucleotide sequence of SEQ ID NOs: 4, 6, 7, or 8, a nucleotide sequence that is at least 85%, at least 90%, or at least 95% identical to SEQ ID NO: 4, 6, 7 or 8,

[0072] Embodiment 29 is a method of producing a modification in the genome of a target cell, the method comprising:
[0073] (a) contacting the cell with a first polypeptide, or a nucleic acid encoding the first polypeptide, wherein the first polypeptide comprises a first cleavase and a first intein, wherein the first cleavase is a S. pyogenes (Spy)Cas9 cleavase, said SpyCas9 cleavase comprising a R1333K mutation within its protospacer adjacent motif recognition domain;
[0074] (b) contacting the cell with a second polypeptide, or a nucleic acid encoding the first polypeptide, wherein the second polypeptide comprises a second cleavase and a second intein capable of binding the first intein, wherein the second cleavase is a N. meningitidis (Nme)Cas9 cleavase, a C. jejuni (Cje) Cas9 cleavase, or a S. muelleri (Smu) Cas9 cleavase;
[0075] and wherein the first polypeptide binds to the second polypeptide through intein catalysis,
[0076] (c) contacting the cell with a first guide RNA that directs the first cleavase to a first genomic locus; and
[0077] (d) contacting the cell with a second guide RNA that directs the second cleavase to a second genomic locus, wherein the second genomic locus is different from the first genomic locus.

[0078] Embodiment 30 is the method of Embodiment 29, wherein the first polypeptide comprises, from N-terminus to C-terminus:
[0079] a. the first intein;
[0080] b. the first cleavase, wherein the first cleavase is a S. pyogenes (Spy)Cas9 cleavase, said SpyCas9 cleavase comprising a R1333K mutation within its protospacer adjacent motif recognition domain; and
[0081] c. a first NLS comprising an SV40 NLS.

[0082] Embodiment 31 is the method of Embodiment 29 or 30, wherein the second polypeptide comprises, from N-terminus to C-terminus:
[0083] a. a second NLS comprising an SV40 NLS;
[0084] b. a third NLS comprising a nucleoplasmin NLS;
[0085] c. the second cleavase;
[0086] d. a peptide linker, optionally wherein the peptide linker comprises 41 or 81 amino acid residues; and
[0087] e. the second intein capable of binding the first intein.

[0088] Embodiment 32 is the method of any one of Embodiments 29-31, wherein the first polypeptide comprise an amino acid sequence of SEQ ID NOs: 28 or 31 or an amino acid sequence that is at least 85%, at least 90%, or at least 95% identical to SEQ ID NO: 28 or 31; or the nucleic acid or nucleic acids encoding the polypeptide or polypeptides comprises a sequence of SEQ ID NOs: 27 or 30, or a nucleotide sequence that is at least 85%, at least 90%, or at least 95% identical to SEQ ID NOs: 27 or 30.

[0089] Embodiment 33 is the method of any one of Embodiments 29-33, wherein the second polypeptide comprise an amino acid sequence of SEQ ID NOs: 25 or 34 or an amino acid sequence that is at least 85%, at least 90%, or at least 95% identical to SEQ ID NO: 25 or 34; or the nucleic acid or nucleic acids encoding the polypeptide or polypeptides comprises a sequence of SEQ ID NOs: 24 or 33, or a nucleotide sequence that is at least 85%, at least 90%, or at least 95% identical to SEQ ID NOs: 24 or 33.

[0090] Embodiment 34 is the method of any one of the preceding Embodiments, wherein the first guide RNA and the second guide RNA target two non-overlapping genomic loci.

[0091] Embodiment 35 is The method of the immediately preceding Embodiment, wherein the two non-overlapping genomic loci are separated by equal to or less than 150, 140, 130, 120, 110, 100, 90, 80, 70, 60, 50, 40, 30, or 25 nucleotides.

[0092] Embodiment 36 is the method of the immediately preceding Embodiment, wherein the two non-overlapping genomic loci are separated by equal to or less than 110 nucleotides.

[0093] Embodiment 37 is the method of any one of the preceding Embodiments, wherein the first guide RNA is a single guide RNA (sgRNA).

[0094] Embodiment 38 is the method of any one of the preceding Embodiments, wherein the first guide RNA is a SpyCas9 guide RNA.

[0095] Embodiment 39 is the method of the immediately preceding Embodiment, wherein the SpyCas9 guide RNA is a single guide RNA comprising:
[0096] a conserved portion of an sgRNA comprising an upper stem and hairpin region, wherein every nucleotide in the upper stem region is modified with 2′-O-Me, and every nucleotide in the hairpin region is modified with 2′-O-Me;
[0097] a 3′ end modification comprising 2′-O-Me modified nucleotides at the last three nucleotides of the 3′ end and phosphorothioate (PS) bonds between the last four nucleotides of the 3′ end; and
[0098] 5′ end modification comprising 2′-O-Me modified nucleotides at the first three nucleotides of the 5′ end; and phosphorothioate (PS) bonds between the first four nucleotides of the 5′ end.

[0099] Embodiment 40 is the method of Embodiment 38 or 39, wherein the SpyCas9 guide RNA is a short-single guide RNA (short-sgRNA) comprising a conserved portion of an sgRNA comprising a hairpin region, wherein the hairpin region lacks at least 5-10 nucleotides and wherein the short-sgRNA comprises (i) a 5′ end modification or (ii) a 3′ end modification.

[0100] Embodiment 41 is the method of any one of the preceding Embodiments, wherein the first guide RNA is a SpyCas9 guide RNA that is a single guide RNA comprising a nucleotide sequence selected from SEQ ID NOs: 159-167, 170-177, and 180-194, or a nucleotide sequence that is at least 85%, 90%, or 95% identical to SEQ ID NOs: 159-167, 170-177, and 180-194.

[0101] Embodiment 42 is the method of any one of the preceding Embodiments, wherein the second guide RNA is a single guide RNA (sgRNA).

[0102] Embodiment 43 is the method of the immediately preceding Embodiment, wherein the second guide RNA is a shortened or chemically modified single guide RNA (sgRNA).

[0103] Embodiment 44 is the method of any one of the preceding Embodiments, wherein the second guide RNA is a NmeCas9 guide RNA.

[0104] Embodiment 45 is the method of any one of the preceding Embodiments, wherein the second guide RNA is a NmeCas9 guide RNA that is a single guide RNA comprising a nucleotide sequence selected from SEQ ID NOs: 280-297, or a nucleotide sequence that is at least 85%, 90%, or 95% identical to SEQ ID NOs: 280-297.

[0105] Embodiment 46 is the method of the immediately preceding Embodiment, wherein the second guide RNA comprises one or more internal polyethylene glycol (PEG) linker, optionally wherein the second guide RNA comprises at least 85%, 90%, 95%, 99%, 100% identical to a sequence selected from SEQ ID NOs: 272-278.

[0106] Embodiment 47 is the method of any one of the preceding Embodiments, wherein one or both of the guide RNAs comprises one or more mismatches to the target sequences.

[0107] Embodiment 48 is the method of any one of the preceding Embodiments, wherein the nucleic acid encoding the fusion protein is delivered to the cell on at least one vector.

[0108] Embodiment 49 is the method of any one of the preceding Embodiments, wherein the fusion protein or the nucleic acid encoding the fusion protein are delivered to the cell via electroporation.

[0109] Embodiment 50 is the method of any one of the preceding Embodiments, wherein the first guide RNA is delivered to the cell via electroporation.

[0110] Embodiment 51 is the method of any one of the preceding Embodiments, wherein the second guide RNA is delivered to the cell via electroporation.

[0111] Embodiment 52 is the method of any one of Embodiments 1-48, wherein one or more of the nucleic acids encoding the fusion protein, the first guide RNA, and the second guide RNA are associated with one or more lipid nanoparticle (LNP).

[0112] Embodiment 53 is the method of any one of Embodiments 1-48 or 52, wherein the nucleic acids encoding the fusion protein are each associated with a separate lipid nanoparticle (LNP).

[0113] Embodiment 54 is the method of any one of Embodiments 1-48 or 52-53, wherein the first guide RNA and the second guide RNA are associated with a same lipid nanoparticle (LNP).

[0114] Embodiment 55 is the method of any one of Embodiments 1-48 or 52-54, wherein all of the nucleic acids encoding the fusion protein, the first guide RNA, and the second guide RNA are associated with a same lipid nanoparticle (LNP).

[0115] Embodiment 56 is the method of any one of Embodiments 1-48 or 52-55, wherein the LNP comprises (i) an ionizable lipid; (ii) a helper lipid; (iii) a stealth lipid; (iv) a neutral lipid; or combinations of one or more of (i)-(iv).

[0116] Embodiment 57 is the method of the immediately preceding Embodiment, wherein the ionizable lipid is (9Z,12Z)-3-((4,4-bis(octyloxy)butanoyl)oxy)-2-((((3-(diethylamino)propoxy)carbonyl)oxy)methyl)propyl octadeca-9,12-dienoate, also called 3-((4,4-bis(octyloxy)butanoyl)oxy)-2-((((3-(diethylamino)propoxy)carbonyl)oxy)methyl)propyl (9Z,12Z)-octadeca-9,12-dienoate.

[0117] Embodiment 58 is the method of Embodiment 56 or 57, wherein the helper lipid is cholesterol.

[0118] Embodiment 59 is the method of any one of Embodiments 56-58 immediately preceding Embodiments, wherein the stealth lipid is PEG-DMG.

[0119] Embodiment 60 is the method of any one of Embodiments 56-59, wherein the PEG-DMG is 1,2-dimyristoyl-rac-glycero-3-methoxypolyethylene glycol-2000 (PEG2k-DMG).

[0120] Embodiment 61 is the method of any one of Embodiments 56-60, wherein the neutral lipid is DSPC.

[0121] Embodiment 62 is the method of any one of Embodiments 56-61, wherein the LNP composition comprises about 50 mol-% ionizable lipid; about 9 mol-% neutral lipid; about 3 mol-% of stealth lipid, and the remainder of the lipid component is helper lipid such as cholesterol.

[0122] Embodiment 63 is the method of any one of Embodiments 56-62, wherein the LNP comprises (9Z,12Z)-3-((4,4-bis(octyloxy)butanoyl)oxy)-2-((((3-(diethylamino)propoxy)carbonyl)oxy)methyl)propyl octadeca-9,12-dienoate, also called 3-((4,4-bis(octyloxy)butanoyl)oxy)-2-((((3-(diethylamino)propoxy)carbonyl)oxy)methyl)propyl (9Z,12Z)-octadeca-9,12-dienoate, DSPC, cholesterol, and PEG2k-DMG.

[0123] Embodiment 64 is the method of any one of the preceding Embodiments, wherein the modification is in vivo.

[0124] Embodiment 65 is the method of any one of Embodiments 1-63, wherein the modification is ex vivo.

[0125] Embodiment 66 is the method of any one of the preceding Embodiments, wherein the modification comprises a deletion of equal to or less than 150, 140, 130, 120, 110, 100, 90, 80, 70, 60, 50, 40, 30 nucleotides.

[0126] Embodiment 67 is the method of the immediately preceding Embodiment, wherein the modification comprises a deletion of equal to or less than 150, 140, 130, 120, 110, 100, 90, 80, 70, 60, 50, 40, 30, or 25 contiguous nucleotides.

[0127] Embodiment 68 is the method of any one of the preceding Embodiments, wherein the modification comprises a deletion of equal to or larger than 25, 35, 45, 55, 65, 75, 85, 95, 100, 105 nucleotides.

[0128] Embodiment 69 is the method of the immediately preceding Embodiment, wherein the modification comprises a deletion of equal to or larger than 25, 35, 45, 55, 65, 75, 85, 95, 100, 105 contiguous nucleotides.

[0129] Embodiment 70 is the method of any one of the preceding Embodiments, wherein the modification comprises a deletion of each of the nucleotides between a first cleavage site and a second cleavage site.

[0130] Embodiment 71 is the method of any one of Embodiments 66-70, wherein the deletion comprises one or both protospacer adjacent motif (PAM) sites recognized by the first cleavase or the second cleavase.

[0131] Embodiment 72 is the method of any one of the preceding Embodiments, wherein the modification increases the expression of one or more RNAs or proteins.

[0132] Embodiment 73 is the method of any one of the preceding Embodiments, wherein the modification increases the expression of one or more mRNAs by at least two-fold.

[0133] Embodiment 74 is the method of any one of the preceding Embodiments, wherein the modification increases the expression of one or more proteins by at least two-fold.

[0134] Embodiment 75 is the method of any one of the preceding Embodiments, wherein the modification results in the deletion of a start codon.

[0135] Embodiment 76 is the method of any one of the preceding Embodiments, wherein the modification reduces or eliminates the expression of one or more mRNAs or proteins.

[0136] Embodiment 77 is the method of any one of the preceding Embodiments, wherein the modification reduces or eliminates the expression of one or more mRNAs by at least 50%, at least 55%, at least 60%, at least 65%, at least 70%, at least 75%, at least 80%, at least 85%, at least 90%, or at least 95%.

[0137] Embodiment 78 is the method of any one of the preceding Embodiments, wherein the modification reduces or eliminates the expression of one or more proteins by at least 50%, at least 55%, at least 60%, at least 65%, at least 70%, at least 75%, at least 80%, at least 85%, at least 90%, or at least 95%.

[0138] Embodiment 79 is the method of any one of the preceding Embodiments, wherein the cell is in a subject.

[0139] Embodiment 80 is the method of any one of the preceding Embodiments, wherein the cell is a kidney cell.

[0140] Embodiment 81 is the method of any one of the preceding Embodiments, wherein the cell is a liver cell.

[0141] Embodiment 82 is the method of any one of the preceding Embodiments, wherein the cell is selected from: a mesenchymal stem cell; a hematopoietic stem cell (HSC); a mononuclear cell; an endothelial progenitor cells (EPC); a neural stem cells (NSC); a limbal stem cell (LSC); a tissue-specific primary cell or a cell derived therefrom (TSC), an induced pluripotent stem cell (iPSC); an ocular stem cell; a pluripotent stem cell (PSC); an embryonic stem cell (ESC); and a cell for organ or tissue transplantation.

[0142] Embodiment 83 is the method of any one of the preceding Embodiments, wherein the cell is an immune cell.

[0143] Embodiment 84 is the method of any one of the preceding Embodiments, wherein the cell is a lymphocyte.

[0144] Embodiment 85 is the method of any one of the preceding Embodiments, wherein the cell is a T-cell.

[0145] Embodiment 86 is an engineered cell or population of engineered cells altered by the method of any one of the preceding Embodiments.

[0146] Embodiment 87 is the engineered cell or population of engineered cells of the immediately preceding Embodiment, wherein the genetic modification comprises a deletion of equal to or less than 110, 100, 90, 80, 70, 60, 50, 40, 30, or 25 nucleotides.

[0147] Embodiment 88 is the engineered cell or population of engineered cells of any one of Embodiments 86 or 87, wherein the deletion comprises one or both protospacer adjacent motif (PAM) sites.

[0148] Embodiment 89 is a polynucleotide comprising an open reading frame (ORF) encoding a fusion protein, wherein the fusion protein comprises a first cleavase and a second cleavase, wherein:
[0149] a. the first cleavase is a S. pyogenes (Spy)Cas9 cleavase, said SpyCas9 cleavase comprising a R1333K mutation within its protospacer adjacent motif recognition domain; and
[0150] b. the second cleavase is a N. meningitidis (Nme)Cas9 cleavase, a C. jejuni (Cje) Cas9 cleavase, or a S. muelleri (Smu) Cas9 cleavase.

[0151] Embodiment 90 is a composition comprising
[0152] (a) a polynucleotide comprising an open reading frame (ORF) encoding a fusion protein, wherein the fusion protein comprises a first cleavase and a second cleavase, wherein:
   [0153] a. the first cleavase is a S. pyogenes (Spy)Cas9 cleavase, said SpyCas9 cleavase comprising a R1333K mutation within its protospacer adjacent motif recognition domain; and
   [0154] b. the second cleavase is a N. meningitidis (Nme)Cas9 cleavase, a C. jejuni (Cje) Cas9 cleavase, or a Simonsiella muelleri (Smu) Cas9 cleavase; and
[0155] (b) a first guide RNA that directs the first cleavase to a first genomic locus; and
[0156] (c) a second guide RNA that directs the second cleavase to a second genomic locus,
[0157] wherein the second genomic locus is different from the first genomic locus.

[0158] Embodiment 91 is a composition comprising
[0159] (a) a first polynucleotide comprising an ORF encoding the first polypeptide, wherein the first polypeptide comprises first cleavase and a first intein, wherein the first cleavase is a S. pyogenes (Spy)Cas9 cleavase, said SpyCas9 cleavase comprising a R1333K mutation within its protospacer adjacent motif recognition domain;
[0160] (b) a second polynucleotide comprising an ORF encoding the second polypeptide, wherein the second polypeptide comprises a second cleavase and a second intein capable of binding the first intein, wherein the second cleavase is a N. meningitidis (Nme)Cas9 cleavase, a C. jejuni (Cje) Cas9 cleavase, or a Simonsiella muelleri (Smu) Cas9 cleavase;
   and wherein the first polypeptide binds to the second polypeptide through intein catalysis,

[0161] Embodiment 92 is one or more lipid nanoparticles comprising:
[0162] (a) a polynucleotide comprising an open reading frame (ORF) encoding a fusion protein, wherein the fusion protein comprises a first cleavase and a second cleavase, wherein:
   [0163] a. the first cleavase is a S. pyogenes (Spy)Cas9 cleavase, said SpyCas9 cleavase comprising a R1333K mutation within its protospacer adjacent motif recognition domain; and
   [0164] b. the second cleavase is a N. meningitidis (Nme)Cas9 cleavase, a C. jejuni (Cje) Cas9 cleavase, or a Simonsiella muelleri (Smu) Cas9 cleavase; and
[0165] (b) a first guide RNA that directs the first cleavase to a first genomic locus; and
[0166] (c) a second guide RNA that directs the second cleavase to a second genomic locus,
[0167] wherein the second genomic locus is different from the first genomic locus.

[0168] Embodiment 93 is the polynucleotide, composition or lipid nanoparticles of any one of Embodiments 89-92, wherein (i) the SpyCas9 cleavase comprises an amino acid sequence of SEQ ID NO: 105 or an amino acid sequence that is at least 85%, at least 90%, or at least 95% identical to SEQ ID NO: 105; or (ii) the nucleotide encoding the SpyCas9 cleavase comprises an open reading frame (ORF) comprising a sequence of SEQ ID NO: 104 or a nucleotide sequence that is at least 85, at least 90%, or at least 95% identical to SEQ ID NO: 104.

[0169] Embodiment 94 is the polynucleotide, composition or lipid nanoparticles of any one of Embodiments 89-93, wherein the second cleavase is a NmeCas9 cleavase.

[0170] Embodiment 95 is the polynucleotide, composition or lipid nanoparticles of any one of Embodiments 89-94, wherein the NmeCas9 cleavase is an Nme1Cas9, an Nme2Cas9, or an Nme3Cas9.

[0171] Embodiment 96 is the polynucleotide, composition or lipid nanoparticles of any one of Embodiments 89-95, wherein (i) the NmeCas9 cleavase comprises an amino acid sequence of any one of SEQ ID NO: 22, 107, 109, 120, 127, 136, or 137 or an amino acid sequence that is at least 85%, at least 90%, at least 95% identical to any one of SEQ ID NO: 22, 107, 109, 120, 127, 136, or 137; or (ii) the nucleotide encoding the NmeCas9 cleavase comprises a nucleotide sequence of any one of SEQ ID NO: 21, 106, 108, 121-126, 128-133, 134, 135, 138, or 139; or a nucleotide sequence that is at least 85%, at least 90%, or at least 95% identical to any one of SEQ ID NO: SEQ ID NO: 21, 106, 108, 121-126, 128-133, 134, 135, 138, or 139.

[0172] Embodiment 97 is the polynucleotide, composition or lipid nanoparticles of any one of Embodiments 89-96, wherein (a) the NmeCas9 cleavase is a Nme2Cas9 comprises an amino acid sequence of any one of SEQ ID NO: 22, 109, or 136, or an amino acid sequence that is at least 85%, at least 90%, at least 95% identical to any one of SEQ ID NO: 22, 109, or 136; or (b) the nucleotide encoding the NmeCas9 cleavase comprises a nucleotide sequence of any one of SEQ ID NO: 21, 108, or 138; or a nucleotide sequence that is at least 85%, at least 90%, or at least 95% identical to any one of SEQ ID NO: SEQ ID NO: 21, 108, or 138.

[0173] Embodiment 98 is the polynucleotide, composition or lipid nanoparticles of any one of Embodiments 89-97, wherein (a) the CjeCas9 cleavase comprises an amino acid sequence of SEQ ID NO: 144; or an amino acid sequence that is at least 85%, at least 90%, or at least 95% identical to SEQ ID NO: 144; or (b) the nucleotide encoding the CjeCas9 cleavase comprises a sequence of SEQ ID NO: 143 or a nucleotide sequence that is at least 85%, at least 90%, or at least 95% identical to SEQ ID NO: 143.

[0174] Embodiment 99 is the polynucleotide, composition or lipid nanoparticles of any one of Embodiments 89-98, wherein (a) the SmuCas9 cleavase comprises an amino acid sequence of SEQ ID NO: 142; or an amino acid sequence that is at least 85%, at least 90%, or at least 95% identical to SEQ ID NO: 142; or (b) the nucleotide encoding the SmuCas9 cleavase comprises an open reading frame (ORF) comprising a sequence of SEQ ID NO: 140 or 141 or a nucleotide sequence that is at least 85%, at least 90%, or at least 95% identical to SEQ ID NO: 140 or 141.

[0175] Embodiment 100 is the polynucleotide, composition or lipid nanoparticles of any one of Embodiments 89-99, wherein the fusion protein comprises a peptide linker between the first cleavase and the second cleavase.

[0176] Embodiment 101 is the polynucleotide, composition or lipid nanoparticles of any one of Embodiments 89-100, wherein the fusion protein comprises a peptide linker between the first cleavase and the second cleavase and the peptide linker comprises at least 10, at least 20, at least 30, at least 40, at least 50, at least 60, at least 70, at least 80 amino acids.

[0177] Embodiment 102 is the polynucleotide, composition or lipid nanoparticles of any one of Embodiments 89-101, wherein the fusion protein comprises a peptide linker between the first cleavase and the second cleavase and the peptide linker comprises 11, 21, 31, 41, 51, 61, 71, or 81 amino acid residues.

[0178] Embodiment 103 is the polynucleotide, composition or lipid nanoparticles of any one of Embodiments 89-102, wherein the fusion protein comprises a peptide linker between the first cleavase and the second cleavase and the peptide linker comprises an amino acid sequence of any one of SEQ ID NOs: 150-158; or an amino acid sequence is at least 85%, at least 90%, or at least 95% identical to any one of SEQ ID NOs: 150-158.

[0179] Embodiment 104 is the polynucleotide, composition or lipid nanoparticles of any one of Embodiments 89-103, wherein the fusion protein comprises a nuclear localization signal (NLS).

[0180] Embodiment 105 is the polynucleotide, composition or lipid nanoparticles of any one of Embodiments 89-104, wherein the fusion protein comprises a nuclear localization signal (NLS) and the NLS is present at the C-terminus of the fusion protein.

[0181] Embodiment 106 is the polynucleotide, composition or lipid nanoparticles of any one of Embodiments 89-105, wherein the fusion protein comprises a nuclear localization signal (NLS) and the NLS is present at the N-terminus of the fusion protein.

[0182] Embodiment 107 is the polynucleotide, composition or lipid nanoparticles of any one of Embodiments 89-106, wherein the fusion protein comprises a nuclear localization signal (NLS) and the NLS is present at both the N-terminus and C-terminus of the fusion protein.

[0183] Embodiment 108 is the polynucleotide, composition or lipid nanoparticles of any one of any one of Embodiments 89-107, wherein the fusion protein comprises a nuclear localization signal (NLS), and wherein the NLS comprises a sequence having at least 80%, at least 85%, at least 90%, or at least 95% identity to any one of SEQ ID NOs: 366-369 and 371-384.

[0184] Embodiment 109 is the polynucleotide, composition or lipid nanoparticles of any one of Embodiments 89-108, wherein the fusion protein comprises a nuclear localization signal (NLS), and wherein the NLS is encoded by a sequence having at least 80%, at least 85%, at least 90%, at least 95%, at least 98% or 100% identity to the sequence of any one of SEQ ID NOs: 370 and 385-397.

[0185] Embodiment 110 is the polynucleotide, composition or lipid nanoparticles of any one of Embodiments 89-109, wherein the fusion protein comprise one, two, or three nuclear localization signals (NLSs) independently selected from SEQ ID NOs: 366-369 and 371-384.

[0186] Embodiment 111 is the polynucleotide, composition or lipid nanoparticles of any one of Embodiments 89-110, wherein the fusion protein comprises, from N-terminus to C-terminus:
[0187] a. the first cleavase;
[0188] b. a peptide linker, optionally wherein the linker comprises 81 amino acid residues;
[0189] c. the second cleavase; and
[0190] d. an NLS comprising an SV40 NLS.

[0191] Embodiment 112 is the polynucleotide, composition or lipid nanoparticles of any one of Embodiments 89-111, wherein the fusion protein comprises, from N-terminus to C-terminus:
[0192] a. a first NLS, wherein the first NLS comprises an SV40 NLS;
[0193] b. the second cleavase;
[0194] c. a peptide linker, optionally wherein the peptide linker comprises 41 amino acids;
[0195] d. the first cleavase;
[0196] e. a second NLS, wherein the second NLS comprising an SV40 NLS.

[0197] Embodiment 113 is the polynucleotide, composition or lipid nanoparticles of any one of Embodiments 89-112, wherein the fusion protein comprises, from N-terminus to C-terminus:
[0198] a. the second cleavase;
[0199] b. a peptide linker, optionally wherein the peptide linker comprises 41 amino acids;
[0200] c. the first cleavase; and
[0201] d. an NLS, optionally wherein the NLS comprises an SV40 NLS.

[0202] Embodiment 114 is the polynucleotide, composition or lipid nanoparticles of any one of any one of Embodiments 89-113, wherein
[0203] (a) the fusion protein comprise an amino acid sequence of SEQ ID NOs: 3, 5, 7, 10, 13, 16, 40, 43, 45, 47, 50, 52, 55, 57, 60, 62, 65, 67, 70, 72, 75, 77, 80, 82, 85, 87, 90, 92, 101, or 105, or an amino acid sequence that is at least 90%, or at least 95% identical to SEQ ID NO: 3, or an amino acid sequence that is at least 85%, at least 90%, or at least 95%% identical to an amino acid sequence of SEQ ID NOs: 5, 7, 10, 13, 16, 40, 43, 45, 47, 50, 52, 55, 57, 60, 62, 65, 67, 70, 72, 75, 77, 80, 82, 85, 87, 90, 92, 101, or 105; or
[0204] (b) the nucleic acid encoding the fusion protein comprises a nucleotide sequence of SEQ ID NOs: 1-2, 4, 6-8, 9, 11, 12, 14-15, 38-39, 41-42, 44, 46, 48-49, 51, 53, 54, 56, 58, 59, 61, 63, 64, 66, 68, 69, 71, 73, 74, 76, 78, 79, 81, 83, 84, 86, 88, 89, 91, 100, or 104, or a nucleotide sequence that is at least 90%, or at least 95% identical to SEQ ID NO: 1 or 2, or a nucleotide sequence that is at least 85%, at least 90%, or at least 95% identical to SEQ ID NO: 4, 6, 8, 9, 11, 12, 14-15, 38-39, 41-42, 44, 46, 48-49, 51, 53, 54, 56, 58, 59, 61, 63, 64, 66, 68, 69, 71, 73, 74, 76, 78, 79, 81, 83, 84, 86, 88, 89, 91, 100, or 104.

[0205] Embodiment 115 is the polynucleotide, composition or lipid nanoparticles of any one of Embodiments 89-114, wherein
[0206] (a) the fusion protein comprise an amino acid sequence of SEQ ID NOs: 3, 5, 7, 10, or 13, or an amino acid sequence that is at least 90%, or at least 95% identical to SEQ ID NO: 3, or an amino acid sequence that is at least 85%, at least 90%, or at least 95%% identical to an amino acid sequence of SEQ ID NOs: 5, 7, 10, or 13; or
[0207] (b) the nucleic acid encoding the fusion protein comprises a nucleotide sequence of SEQ ID NOs: 1, 2, 4, 6, 8, 9, 11 or 12, or a nucleotide sequence that is at least 90%, or at least 95% identical to SEQ ID NO: 1 or 2, or a nucleotide sequence that is at least 85%, at least 90%, or at least 95% identical to SEQ ID NO: 4, 6, 8, 9, 11 or 12.

[0208] Embodiment 116 is the polynucleotide, composition, or lipid nanoparticles of any one of Embodiments 89-115, wherein
[0209] (a) the fusion protein comprise an amino acid sequence of SEQ ID NOs: 5, 7, 10, or 13 or an amino acid sequence that is at least 85%, at least 90%, or at least 95%% identical to an amino acid sequence of SEQ ID NOs: 5, 7, 10, or 13; or
[0210] (b) the nucleic acid encoding the fusion protein comprises a nucleotide sequence of SEQ ID NOs: 4, 6, 8, 9, 11 or 12, a nucleotide sequence that is at least 85%, at least 90%, or at least 95% identical to SEQ ID NO: 4, 6, 8, 9, 11 or 12.

[0211] Embodiment 117 is the polynucleotide, composition, or lipid nanoparticles of Embodiment 116, wherein the first polypeptide comprises, from N-terminus to C-terminus:
[0212] a. the first intein;
[0213] b. the first cleavase, wherein the first cleavase is a S. pyogenes (Spy)Cas9 cleavase, said SpyCas9 cleavase comprising a R1333K mutation within its protospacer adjacent motif recognition domain; and
[0214] c. a first NLS comprising an SV40 NLS.

[0215] Embodiment 118 is the polynucleotide, composition, or lipid nanoparticles of Embodiment 116 or 117, wherein the second polypeptide comprises, from N-terminus to C-terminus:
[0216] a. a second NLS comprising an SV40 NLS;
[0217] b. a third NLS comprising a nucleoplasmin NLS;
[0218] c. the second cleavase;
[0219] d. a peptide linker, optionally wherein the peptide linker comprises 41 or 81 amino acid residues; and
[0220] e. the second intein capable of binding the first intein.

[0221] Embodiment 119 is the polynucleotide, composition, or lipid nanoparticles of any one of Embodiments 116-118, wherein the first polypeptide comprise an amino acid sequence of SEQ ID NOs: 28 or 31 or an amino acid sequence that is at least 85%, at least 90%, or at least 95% identical to SEQ ID NO: 28 or 31; or the nucleic acid or nucleic acids encoding the polypeptide or polypeptides comprises a sequence of SEQ ID NOs: 27 or 30, or a nucleotide sequence that is at least 85%, at least 90%, or at least 95% identical to SEQ ID NOs: 27 or 30.

[0222] Embodiment 120 is the polynucleotide, composition, or lipid nanoparticles of any one of Embodiments 116-119, wherein the second polypeptide comprise an amino acid sequence of SEQ ID NOs: 25 or 34 or an amino acid sequence that is at least 85%, at least 90%, or at least 95% identical to SEQ ID NO: 25 or 34; or the nucleic acid or nucleic acids encoding the polypeptide or polypeptides comprises a sequence of SEQ ID NOs: 24 or 33, or a nucleotide sequence that is at least 85%, at least 90%, or at least 95% identical to SEQ ID NOs: 24 or 33.

[0223] Embodiment 121 is the polynucleotide, composition or lipid nanoparticles of any one of Embodiments 89-120, wherein the polynucleotide comprises a 5′ UTR with at least 85%, at least 90%, or at least 95% identity to any one of SEQ ID NOs: 398-405.

[0224] Embodiment 122 is the polynucleotide, composition or lipid nanoparticles of any one of Embodiments 89-121, wherein the polynucleotide comprises a 3′ UTR with at least 85%, at least 90%, or at least 95% identity to any one of SEQ ID NOs: 406-413.

[0225] Embodiment 123 is the polynucleotide, composition or lipid nanoparticles of any one of Embodiments 89-122, wherein the polynucleotide comprises a 5′ UTR and 3′ UTR from the same source.

[0226] Embodiment 124 is the polynucleotide, composition or lipid nanoparticles of any one of Embodiments 89-123, wherein the polynucleotide comprises a 5′ cap, optionally wherein the 5′ cap is Cap0, Cap1, or Cap2.

[0227] Embodiment 125 is the polynucleotide, composition or lipid nanoparticles of any one of Embodiments 89-124, wherein the polynucleotide is an mRNA.

[0228] Embodiment 126 is the polynucleotide, composition or lipid nanoparticles of any one of Embodiments 89-125, wherein at least 85% of the uridine is substituted with a modified uridine.

[0229] Embodiment 127 is the polynucleotide, composition or lipid nanoparticles of Embodiment 126, wherein the modified uridine is one or more of N1-methyl-pseudouridine, pseudouridine or 5-iodouridine.

[0230] Embodiment 128 is the polynucleotide, composition or lipid nanoparticles of any one of Embodiments 126-127, wherein the modified uridine is N1-methyl-pseudouridine.

[0231] Embodiment 129 is the polynucleotide, composition or lipid nanoparticles of any one of Embodiments 126-128, wherein the modified uridine is pseudouridine.

[0232] Embodiment 130 is the polynucleotide, composition or lipid nanoparticles of Embodiment 126, wherein the modified uridine is 5-iodouridine.

[0233] Embodiment 131 is the polynucleotide, composition or lipid nanoparticles of any one of Embodiments 126-130, wherein at least 85% of the uridine is substituted with the modified uridine.

[0234] Embodiment 132 is the polynucleotide, composition or lipid nanoparticles of any one of Embodiments 126-131, wherein 100% uridine is substituted with the modified uridine.

[0235] Embodiment 133 is the composition or lipid nanoparticles of any one of Embodiments 90-132, wherein one or more of the nucleic acids encoding the fusion protein, the first guide RNA, and the second guide RNA are associated with one or more lipid nanoparticle (LNP).

[0236] Embodiment 134 is the composition or lipid nanoparticles of any one of Embodiments 90-133, wherein the nucleic acids encoding the fusion protein are each associated with a separate lipid nanoparticle (LNP).

[0237] Embodiment 135 is the composition or lipid nanoparticles of any one of Embodiments 90-133, wherein the first guide RNA and the second guide RNA are associated with a same lipid nanoparticle (LNP).

[0238] Embodiment 136 is the composition or lipid nanoparticles of any one of Embodiments 90-133, wherein all of the nucleic acids encoding the fusion protein, the first guide RNA, and the second guide RNA are associated with a same lipid nanoparticle (LNP).

[0239] Embodiment 137 is the composition or lipid nanoparticles of any one of Embodiments 133-136, wherein the LNP comprises (i) an ionizable lipid; (ii) a helper lipid; (iii) a stealth lipid; (iv) a neutral lipid; or combinations of one or more of (i)-(iv).

[0240] Embodiment 138 is the composition or lipid nanoparticles of Embodiment 137, wherein the ionizable lipid is (9Z,12Z)-3-((4,4-bis(octyloxy)butanoyl)oxy)-2-((((3-(diethylamino)propoxy)carbonyl)oxy)methyl)propyl octadeca-9,12-dienoate, also called 3-((4,4-bis(octyloxy)butanoyl)oxy)-2-((((3-(diethylamino)propoxy)carbonyl)oxy)methyl)propyl (9Z,12Z)-octadeca-9,12-dienoate.

[0241] Embodiment 139 is the composition or lipid nanoparticles of any one of Embodiments 133-138, wherein the helper lipid is cholesterol.

[0242] Embodiment 140 is the composition or lipid nanoparticles of any one of Embodiments 133-139 wherein the stealth lipid is PEG-DMG.

[0243] Embodiment 141 is the composition or lipid nanoparticles of any one of Embodiments 133-140, wherein the PEG-DMG is 1,2-dimyristoyl-rac-glycero-3-methoxypolyethylene glycol-2000 (PEG2k-DMG).

[0244] Embodiment 142 is the composition or lipid nanoparticles of any one of Embodiments 133-141, wherein the neutral lipid is DSPC.

[0245] Embodiment 143 is the composition or lipid nanoparticles of any one of Embodiments 133-142, wherein the LNP composition comprises about 50 mol-% ionizable lipid; about 9 mol-% neutral lipid; about 3 mol-% of stealth lipid, and the remainder of the lipid component is helper lipid such as cholesterol.

[0246] Embodiment 144 is the composition or lipid nanoparticles of any one of Embodiments 133-143, wherein the LNP comprises (9Z,12Z)-3-((4,4-bis(octyloxy)butanoyl)oxy)-2-((((3-(diethylamino)propoxy)carbonyl)oxy)methyl)propyl octadeca-9,12-dienoate, also called 3-((4,4-bis(octyloxy)butanoyl)oxy)-2-((((3-(diethylamino)propoxy)carbonyl)oxy)methyl)propyl (9Z,12Z)-octadeca-9,12-dienoate, DSPC, cholesterol, and PEG2k-DMG.

[0247] Embodiment 145 is a polypeptide encoded by the polynucleotide of any one of Embodiments 89-132.

[0248] Embodiment 146 is a vector comprising the polynucleotide of any one of Embodiments 89-132.

[0249] Embodiment 147 is an expression construct comprising a promoter operably linked to a sequence encoding the polynucleotide of any one of Embodiments 89-132.

[0250] Embodiment 148 is a plasmid comprising the expression construct of Embodiment 147.

[0251] Embodiment 149 is a host cell comprising the vector of Embodiment 146, the expression construct of Embodiment 147, or the plasmid of Embodiment 148.

[0252] Embodiment 150 is a pharmaceutical composition comprising the polynucleotide, composition, lipid nanoparticle, or polypeptide of any one of Embodiments 89-145, and a pharmaceutically acceptable carrier.

[0253] Embodiment 151 is a kit comprising the polynucleotide, composition, or polypeptide of any one of Embodiments 89-145.

[0254] Embodiment 152 is the use of the polynucleotide, composition, lipid nanoparticle or polypeptide any one of Embodiments 89-145 for producing a modification in the genome of a target cell.

[0255] Embodiment 153 is the use of the polynucleotide, composition, lipid nanoparticle or polypeptide any one of Embodiments 89-145 for the manufacture of a medicament for producing a modification in the genome of a target cell.

[0256] Embodiment 154 is the method of any one of Embodiments 1-85, wherein one or more of the nucleic acids encoding the fusion protein, the first guide RNA, and the second guide RNA are associated with one or more targeted LNP.

[0257] Embodiment 155 is the method of Embodiment 154, wherein the targeted LNP is targeted to one or more of the brain, eye, muscle, liver, lung, spleen, and bone marrow.

[0258] Embodiment 156 is the method of any one of Embodiments 154-155, wherein the targeted LNP comprises a targeting lipid component.

[0259] Embodiment 157 is the method of any one of Embodiments 154-156, wherein the targeted LNP comprises a targeting domain.

[0260] Embodiment 158 is the method of Embodiment 157, wherein the targeting domain comprises a nucleic acid, peptide, antibody, small molecule, glycan, sugar, or hormone.

[0261] Embodiment 159 is the method of any one of Embodiments 154-158, wherein the targeted LNP is administered by a delivery route of intravenous, intradermal, subcutaneous, inhalation, intranasal, or intramuscular delivery.

[0262] Embodiment 160 is the composition of any one of Embodiments 91 or 93-144, wherein one or more of the nucleic acids encoding the fusion protein, the first guide RNA, and the second guide RNA are associated with one or more targeted LNP.

[0263] Embodiment 161 is the composition of any one of Embodiments 160, wherein the targeted LNP comprises a targeting lipid component.

[0264] Embodiment 162 is the composition of any one of Embodiments 160-161, wherein the targeted LNP comprises a targeting domain.

[0265] Embodiment 163 is the composition of Embodiment 162, wherein the targeting domain comprises a nucleic acid, peptide, antibody, small molecule, glycan, sugar, or hormone.

### BRIEF DESCRIPTION OF THE DRAWINGS

[0266] FIG. 1 shows mean percent editing in HEK-Blue cells.

[0267] FIG. 2 shows percent editing in HEK-Blue cells.

[0268] FIG. 3 shows percent editing in primary mouse hepatocytes.

[0269] FIG. 4 shows percent editing in primary mouse hepatocytes.

[0270] FIG. 5 shows percent editing in Hepa 1-6 cells.

[0271] FIG. 6 shows percent editing in Hepa 1-6 cells.

[0272] FIG. 7 shows orthogonal Cas9-Cas9 fusion and SpyCas9 expression in Hepa 1-6 cells 72 hours post-transfection.

[0273] FIG. 8 shows orthogonal Cas9-Cas9 fusion and SpyCas9 expression relative to GAPDH.

[0274] FIG. 9 shows percent editing at the TTR locus in primary mouse hepatocytes.

[0275] FIG. 10 shows percent editing in liver tissue.

[0276] FIG. 11A shows serum TTR levels.

[0277] FIG. 11B shows serum TTR levels.

[0278] FIG. 12 shows percent editing in liver tissue.

[0279] FIG. 13A shows serum TTR levels.

[0280] FIG. 13B shows serum TTR levels.

[0281] FIG. 14 shows percent editing in transfected cells. The dotted line represents mRNA A excision.

[0282] FIG. 15 shows percent editing in transfected cells.

[0283] FIG. 16 shows orthogonal Cas9-Cas9 fusion protein expression as detected via Western blot.

[0284] FIG. 17 shows mean percent editing in primary mouse hepatocytes.

[0285] FIG. 18 shows mean percent editing at the PSCK9 locus by Spy guides and SpyCas9.

[0286] FIG. 19 shows mean percent editing at the PSCK9 locus by Nme guides and NmeCas9.

[0287] FIG. 20 shows mean percent editing at the PSCK9 locus by Spy guides and orthogonal Cas9-Cas9 fusion.

[0288] FIG. 21 shows mean percent editing at the PSCK9 locus by Nme guides and orthogonal Cas9-Cas9 fusion.

[0289] FIG. 22 shows mean percent editing at the PSCK9 locus by Spy guides and Nme guide G017566 and orthogonal Cas9-Cas9 fusion.

[0290] FIG. 23 shows mean percent editing at the PSCK9 locus by Spy guides and Nme G017564 and orthogonal Cas9-Cas9 fusion.

[0291] FIG. 24 shows mean percent editing at the TTR locus in primary mouse hepatocytes.

[0292] FIG. 25 shows mean percent editing at the TTR locus in primary mouse hepatocytes

[0293] FIG. 26 shows mean percent editing at the TTR locus in cells transfected with orthogonal Cas9-Cas9 fusion mRNA and Nme guides.

[0294] FIG. 27 shows mean percent editing at the TTR locus in cells transfected with NmeCas9 mRNA and Nme guides.

[0295] FIG. 28 shows mean percent editing at the TTR locus in cells transfected with Spy guide G000502, Nme guide G021845, and orthogonal Cas9-Cas9 fusion.

[0296] FIG. 29 shows mean percent editing at the TTR locus in cells transfected with Spy guide G000502, Nme guide G021846, and orthogonal Cas9-Cas9 fusion.

[0297] FIG. 30 shows mean percent editing at the TTR locus in cells transfected with Spy guide G000502 and SpyCas9.

[0298] FIG. 31 shows mean percent editing at the TTR locus in cells transfected with Nme guide G021845 and NmeCas9.

[0299] FIG. 32 shows mean percent editing at the TTR locus in cells transfected with Nme guide G021846 and NmeCas9.

### BRIEF DESCRIPTION OF DISCLOSED SEQUENCES

| SEQ ID | |
|---|---|
| NO | Description |
| 1 | Cas9-Cas9 fusion (mRNA A)-mRNA sequence |
| 2 | Cas9-Cas9 fusion (mRNA A)-ORF sequence |
| 3 | Cas9-Cas9 fusion (mRNA A)-amino acid sequence |
| 4 | Cas9-Cas9 fusion (mRNA A with HiBit)-ORF sequence |
| 5 | Cas9-Cas9 fusion (mRNA A with HiBit)-amino acid sequence |
| 6 | Cas9-Cas9 fusion (mRNA B)-ORF sequence |
| 7 | Cas9-Cas9 fusion (mRNA B)- amino acid sequence |
| 8 | Cas9-Cas9 fusion (mRNA B with HiBit)-mRNA sequence |
| 9 | Cas9-Cas9 fusion (mRNA B with HiBit)-ORF sequence |
| 10 | Cas9-Cas9 fusion (mRNA B with HiBit)-amino acid sequence |
| 11 | Cas9-Cas9 fusion (mRNA C)-mRNA sequence |
| 12 | Cas9-Cas9 fusion (mRNA C)-ORF sequence |
| 13 | Cas9-Cas9 fusion (mRNA C)-amino acid sequence |
| 14 | Cas9-Cas9 fusion (mRNA D)-mRNA sequence |
| 15 | Cas9-Cas9 fusion (mRNA D)-ORF sequence |
| 16 | Cas9-Cas9 fusion (mRNA D)-amino acid sequence |
| 17 | SpyCas9 (mRNA E) -mRNA sequence |
| 18 | SpyCas9 (mRNA E) -ORF sequence |
| 19 | SpyCas9 (mRNA E) -amino acid sequence |
| 20 | Nme2Cas9 (mRNA F) -mRNA sequence |
| 21 | Nme2Cas9 (mRNA F) -ORF sequence |
| 22 | Nme2Cas9 (mRNA F) -amino acid sequence |
| 23 | Nme2 Cas9 Intein (mRNA G) - mRNA sequence |
| 24 | Nme2 Cas9 Intein (mRNA G) - ORF sequence |
| 25 | Nme2 Cas9 Intein (mRNA G) - amino acid sequence |
| 26 | Spy-R1333K Cas9 Intein (mRNA H) -mRNA sequence |
| 27 | Spy-R1333K Cas9 Intein (mRNA H) -ORF sequence |
| 28 | Spy-R1333K Cas9 Intein (mRNA H) -amino acid sequence |
| 29 | Spy-R1333K Cas9 Intein (mRNA I) -mRNA sequence |
| 30 | Spy-R1333K Cas9 Intein (mRNA I) -ORF sequence |
| 31 | Spy-R1333K Cas9 Intein (mRNA I) -amino acid sequence |
| 32 | Nme2 Cas9 Intein (mRNA J) - mRNA sequence |
| 33 | Nme2 Cas9 Intein (mRNA J) - ORF sequence |
| 34 | Nme2 Cas9 Intein (mRNA J) - amino acid sequence |
| 35 | SpyCas9 with HiBit (mRNA K) -mRNA sequence |
| 36 | SpyCas9 with HiBit (mRNA K) -ORF sequence |
| 37 | SpyCas9 with HiBit (mRNA K) -amino acid sequence |
| 38 | Cas9-Cas9 fusion (mRNA L)-mRNA sequence |
| 39 | Cas9-Cas9 fusion (mRNA L)-ORF sequence |
| 40 | Cas9-Cas9 fusion (mRNA L)-amino acid sequence |
| 41 | Cas9-Cas9 fusion with HiBit (mRNA M)-mRNA sequence |
| 42 | Cas9-Cas9 fusion with HiBit (mRNA M)-ORF sequence |
| 43 | Cas9-Cas9 fusion with HiBit (mRNA M)-amino acid sequence |
| 44 | Cas9-Cas9 fusion (mRNA M)-ORF sequence |
| 45 | Cas9-Cas9 fusion (mRNA M)-amino acid sequence |
| 46 | R1333 WT Cas9-Cas9 fusion PA1-4 (mRNA N) - ORF sequence (Example 4) |
| 47 | R1333 WT Cas9-Cas9 fusion PA1-4 (mRNA N) - amino acid sequence |
| | (Example 4) |
| 48 | Cas9-Cas9 fusion-71 amino acid residue linker and HiBit tag (mRNA O)-mRNA |
| | sequence |
| 49 | Cas9-Cas9 fusion-71 amino acid residue linker and HiBit tag (mRNA O)-ORF |
| | sequence |
| 50 | Cas9-Cas9 fusion-71 amino acid residue linker and HiBit tag (mRNA O)-amino |
| | acid sequence |
| 51 | Cas9-Cas9 fusion-71 amino acid residual linker (mRNA O)-mRNA sequence |
| 52 | Cas9-Cas9 fusion-71 amino acid residual linker (mRNA O)-amino acid sequence |
| 53 | Cas9-Cas9 fusion-61 amino acid residue linker and HiBit tag (mRNA P)-mRNA |
| | sequence |
| 54 | Cas9-Cas9 fusion-61 amino acid residue linker and HiBit tag (mRNA P)-ORF |
| | sequence |
| 55 | Cas9-Cas9 fusion-61 amino acid residue linker and HiBit tag (mRNA P)-amino |
| | acid sequence |
| 56 | Cas9-Cas9 fusion-61 amino acid residual linker (mRNA P)-mRNA sequence |
| 57 | Cas9-Cas9 fusion-61 amino acid residual linker (mRNA P)-amino acid sequence |
| 58 | Cas9-Cas9 fusion-51 amino acid residue linker and HiBit tag (mRNA Q)-mRNA |
| | sequence |
| 59 | Cas9-Cas9 fusion-51 amino acid residue linker and HiBit tag (mRNA Q)-ORF |
| | sequence |
| 60 | Cas9-Cas9 fusion-51 amino acid residue linker and HiBit tag (mRNA Q)-amino |
| | acid sequence |
| 61 | Cas9-Cas9 fusion-51 amino acid residual linker (mRNA Q)-ORF sequence |
| 62 | Cas9-Cas9 fusion-51 amino acid residual linker (mRNA Q)-amino acid sequence |
| 63 | Cas9-Cas9 fusion-41 amino acid residue linker and HiBit tag (mRNA R)-mRNA |
| | sequence |
| 64 | Cas9-Cas9 fusion-41 amino acid residue linker and HiBit tag (mRNA R)-ORF |
| | sequence |
| 65 | Cas9-Cas9 fusion-41 amino acid residue linker and HiBit tag (mRNA R)-amino |
| | acid sequence |
| 66 | Cas9-Cas9 fusion-41 amino acid residual linker (mRNA R)-ORF sequence |
| 67 | Cas9-Cas9 fusion-41 amino acid residual linker (mRNA R)-amino acid sequence |
| 68 | Cas9-Cas9 fusion-31 amino acid residue linker and HiBit tag (mRNA S)-mRNA |
| | sequence |
| 69 | Cas9-Cas9 fusion-31 amino acid residue linker and HiBit tag (mRNA S)-ORF |
| | sequence |
| 70 | Cas9-Cas9 fusion-31 amino acid residue linker and HiBit tag (mRNA S)-amino |
| | acid sequence |
| 71 | Cas9-Cas9 fusion-31 amino acid residual linker (mRNA S)-ORF sequence |
| 72 | Cas9-Cas9 fusion-31 amino acid residual linker (mRNA S)-amino acid sequence |
| 73 | Cas9-Cas9 fusion-21 amino acid residue linker and HiBit tag (mRNA T)-mRNA |
| | sequence |
| 74 | Cas9-Cas9 fusion-21 amino acid residue linker and HiBit tag (mRNA T)-ORF |
| | sequence |
| 75 | Cas9-Cas9 fusion-21 amino acid residue linker and HiBit tag (mRNA T)- amino |
| | acid sequence |
| 76 | Cas9-Cas9 fusion-21 amino acid residual linker (mRNA T)-ORF sequence |
| 77 | Cas9-Cas9 fusion-21 amino acid residual linker (mRNA T)-amino acid sequence |
| 78 | Cas9-Cas9 fusion-11 amino acid residue linker and HiBit tag (mRNA U)-mRNA |
| | sequence |
| 79 | Cas9-Cas9 fusion-11 amino acid residue linker and HiBit tag (mRNA U)-ORF |
| | sequence |
| 80 | Cas9-Cas9 fusion-11 amino acid residue linker and HiBit tag (mRNA U)- |
| | Amino acid sequence |
| 81 | Cas9-Cas9 fusion-11 amino acid residual linker (mRNA U)-ORF sequence |
| 82 | Cas9-Cas9 fusion-11 amino acid residual linker (mRNA U)-amino acid sequence |
| 83 | Cas9-Cas9 fusion-81 amino acid residue linker and HiBit tag-SpyCas9 without |
| | Rec2 domain (mRNA V) -mRNA sequence |
| 84 | Cas9-Cas9 fusion-81 amino acid residue linker and HiBit tag-SpyCas9 without |
| | Rec2 domain (mRNA V) -ORF sequence |
| 85 | Cas9-Cas9 fusion-81 amino acid residue linker and HiBit tag-SpyCas9 without |
| | Rec2 domain (mRNA V) -amino acid sequence |
| 86 | Cas9-Cas9 fusion-81 amino acid residual linker withSpyCas9 without Rec2 |
| | domain (mRNA V) -mRNA sequence |
| 87 | Cas9-Cas9 fusion-81 amino acid residual linker with SpyCas9 without Rec2 |
| | domain (mRNA V) -amino acid sequence |
| 88 | Cas9-Cas9 fusion-81 amino acid residue linker and HiBit tag-SpyCas9 without |
| | Rec3 domain (mRNA W) -mRNA sequence |
| 89 | Cas9-Cas9 fusion-81 amino acid residue linker and HiBit tag-SpyCas9 without |
| | Rec3 domain (mRNA W) -ORF sequence |
| 90 | Cas9-Cas9 fusion-81 amino acid residue linker and HiBit tag-SpyCas9 without |
| | Rec3 domain (mRNA W) -amino acid sequence |
| 91 | Cas9-Cas9 fusion-81 amino acid residual linker with SpyCas9 without Rec3 |
| | domain (mRNA W) -mRNA sequence |
| 92 | Cas9-Cas9 fusion-81 amino acid residual linker with SpyCas9 without Rec3 |
| | domain (mRNA W) -amino acid sequence |
| 93 | SpyCas9 (mRNA X) -mRNA sequence |
| 94 | SpyCas9 (mRNA X) -ORF sequence |
| 95 | SpyCas9 (mRNA X) -amino acid sequence |
| 96 | SpyCas9-Nme cleavase fusion ORF |
| 97 | SpyCas9-Nme cleavase fusion amino acid sequence |
| 98 | R1335S Spy Cas9-WT NmeCas9 fusion ORF |
| 99 | R1335S Spy Cas9-WT NmeCas9 fusion amino acid sequence |
| 100 | R1333K Spy-WT NmeCas9 fusion ORF |
| 101 | R1333K Spy -WT NmeCas9 fusion amino acid sequence |
| 102 | WT SpyCas9 -WT NmeCas9 fusion ORF |
| 103 | WT SpyCas9-WT NmeCas9 fusion ORF |
| 104 | Spy Cas9 R133K nucleic acid coding sequence without start or stop codons |
| | suitable for fusion constructs |
| 105 | Amino acid sequence for Spy Cas9 R1333K suitable for fusion constructs |
| 106 | WT Nme1 Cas9 coding sequence |
| 107 | WT Nme1 Cas9 amino acid sequence |
| 108 | Nme2 Cas9 coding sequence |
| 109 | Nme2 Cas9 amino acid sequence |
| 110 | WT SpyCas9 ORF |
| 111 | WT SpyCas9 amino acid sequence |
| 112-119 | NOT USED |
| 120 | Exemplary amino acid sequence of Nme1Cas9 cleavase |
| 121 | Exemplary coding sequence encoding Nme1Cas9 cleavase |
| 122 | Exemplary coding sequence encoding Nme1Cas9 cleavase |
| 123 | Exemplary coding sequence encoding Nme1Cas9 cleavase |
| 124 | Exemplary open reading frame for Nme1Cas9 cleavase |
| 125 | Exemplary open reading frame for Nme1Cas9 cleavase |
| 126 | Exemplary open reading frame for Nme1Cas9 cleavase |
| 127 | Exemplary amino acid sequence of Nme3Cas9 cleavase |
| 128 | Exemplary coding sequence encoding Nme3Cas9 cleavase |
| 129 | Exemplary coding sequence encoding Nme3Cas9 cleavase |
| 130 | Exemplary coding sequence encoding Nme3Cas9 cleavase |
| 131 | Exemplary open reading frame for Nme3Cas9 cleavase |
| 132 | Exemplary open reading frame for Nme3Cas9 cleavase |
| 133 | Exemplary open reading frame for Nme3Cas9 cleavase |
| 134 | Exemplary coding sequence encoding Nme2Cas9 (mRNA AA) |
| 135 | Exemplary coding sequence encoding Nme1Cas9 (mRNA AB) |
| 136 | Exemplary amino acid sequence for Nme2Cas9 (mRNA AA amino acid) |
| 137 | Exemplary amino acid sequence for Nme1Cas9 (mRNA AB amino acid) |
| 138 | Exemplary open reading frame for Nme2Cas9 |
| 139 | Exemplary open reading frame for Nme1Cas9 |
| 140 | WT Smu Cas9 coding sequence |
| 141 | human codon-optimized Smu Cas9 coding sequences |
| 142 | WT Smu Cas9 amino acid sequence |
| 143 | WT Cje Cas9 coding sequence |
| 144 | WT Cje Cas9 amino acid sequence |
| 145-149 | NOT USED |
| 150 | Exemplary amino acid residue linker (81 aa) |
| 151 | Exemplary amino acid residue linker (71 aa) |
| 152 | Exemplary amino acid residue linker (61 aa) |
| 153 | Exemplary amino acid residue linker (51 aa) |
| 154 | Exemplary amino acid residue linker (41 aa) |
| 155 | Exemplary amino acid residue linker (31 aa) |
| 156 | Exemplary amino acid residue linker (21 aa) |
| 157 | Exemplary amino acid residue linker (11 aa) |
| 158 | Exemplary amino acid residue linker (81 aa) |
| 159 | Exemplary SpyCas9 sgRNA-1 (Table 39) |
| 160-167 | Exemplary Spy Guide RNA Conserved Region only- unmodified sequences |
| 168-169 | NOT USED |
| 170-177 | Exemplary Spy Guide RNA unmodified sequence |
| 178-179 | NOT USED |
| 180-191 | Exemplary Spy Guide RNA conserved region only-modified sequences |
| 192-194 | Exemplary Spy Guide RNA -modified sequence |
| 195-199 | NOT USED |
| 200-237 | Exemplary Spy guide RNA sequences |
| 238 | Exemplary Nme guide; plCR012468 |
| 239 | Exemplary Nme guide; plCR012469 |
| 240-253 | Exemplary Nme sgRNA sequences |
| 254 | Exemplary Spy guide; plG000665 |
| 255 | Exemplary Spy guide; plG012746 |
| 256 | Exemplary Spy guide; plG012684 |
| 257 | Exemplary Spy guide; plG012685 |
| 258 | Exemplary Spy guide; plG012686 |
| 259 | Exemplary Spy guide; plG012687 |
| 260 | Exemplary Spy guide; plG012688 |
| 261-269 | Target sequences for Spy guides encoded by the exemplary plasmids |
| 270-271 | NOT USED |
| 272-278 | Exemplary Nme Guide RNA comprising linkers |
| 279 | Exemplary Nme sgRNA-1 (Table 40) |
| 280-283 | Exemplary Nme Guide RNA Conserved Region only- unmodified sequences |
| 284-292 | Exemplary Nme Guide RNA Conserved Region only- modified sequences |
| 293-297 | Exemplary Nme Guide RNA modified sequences |
| 298-300 | NOT USED |
| 301-365 | Exemplary linkers |
| 366-397 | Exemplary NLS amino acid sequences and coding sequences |
| 398-405 | Exemplary 5′ UTR sequences |
| 406-413 | Exemplary 3′ UTR sequences |
| 414 | Exemplary Kozak sequence |
| 415 | Exemplary Kozak sequence |
| 416 | Exemplary poly-A sequence |

### DETAILED DESCRIPTION

[0300] The present disclosure provides, e.g., systems and methods of contacting a cell with an orthogonal Cas9-Cas9 fusion for precise and reproducible genome editing. The methods provide, for example, excising sequences from the genome of a cell without significant side effects such as inversions.

[0301] In some embodiments, provided herein is a method of genetically modifying a cell, comprising contacting the cell with an orthogonal Cas9-Cas9 fusion comprising a first cleavase and a second cleavase, or a nucleic acid encoding the same, thereby excising a DNA sequence between a first cleavage site cleaved by the first Cas9 cleavase and a second cleavage site cleaved by the second Cas9 cleavase.

[0302] The present disclosure also relates to manufacturing methods to prepare cells in vitro for subsequent therapeutic administration to a subject. In some embodiments, the platform relates to genome editing via simultaneous or sequential administration of lipid nanoparticles (LNPs) comprising an orthogonal Cas9-Cas9 fusion comprising a first cleavase and a second cleavase, or a nucleic acid encoding the same as disclosed herein. The systems and methods disclosed herein are relevant to any cell type but is particularly advantageous in preparing cells that require excision of a defined genomic sequence for full therapeutic applicability, e.g., in primary immune cells. As provided herein, the platform methods apply to “a cell” or to “a cell population” (or “population of cells”). When referring to delivery or gene editing methods for “a cell” herein, it is understood that the methods may be used for delivery or gene editing to “a cell population.”

[0303] In some embodiments, provided herein is a cell treated in vitro with any method or composition disclosed herein. In some embodiments, provided herein is a cell treated in vivo with any method or composition disclosed herein. In some embodiments, provided herein is a population of cells comprising any cell disclosed herein.

[0304] In some embodiments, provided herein is use of any cell, population of cells, or composition disclosed herein for treating cancer. In some embodiments, provided herein is use of any cell, population of cells, or composition disclosed herein for preparation of a medicament for treating cancer. In some embodiments, provided herein is an engineered cell modified by the methods disclosed herein, and the engineered cell comprises at least one genomic modification, e.g., deletion of contiguous nucleotides.

[0305] In some embodiments, the orthogonal Cas9-Cas9 fusion disclosed herein comprises a first Cas9 cleavase and a second Cas9 cleavase. The first cleavase may be a S. pyogenes (Spy)Cas9 cleavase, and the SpyCas9 cleavase comprising an R1333K mutation within its protospacer adjacent motif recognition domain. The second cleavase may be an N. meningitidis (Nme)Cas9 cleavase, a C. jejuni (Cje) Cas9 cleavase, or a Simonsiella muelleri (Smu) Cas9 cleavase.

[0306] Accordingly, in some embodiments, a method of producing a modification in the genome of a target cell is provided. In some embodiments, the method comprises contacting the cell with: (a) a fusion protein, or a nucleic acid encoding a fusion protein, wherein the fusion protein comprises a first cleavase and a second cleavase; and (b) a first guide RNA that directs the first cleavase to a first genomic locus; and (c) a second guide RNA that directs the second cleavase to a second genomic locus, wherein the second genomic locus is different from the first genomic locus.

[0307] In some embodiments, a method of producing a cell or a population of cells is provided. In some embodiments, the method comprises a modification in the genome of the target cell or cells, the method comprising contacting the cell or cells with: (a) a fusion protein, or a nucleic acid encoding a fusion protein, wherein the fusion protein comprises a first cleavase and a second cleavase; and (b) a first guide RNA that directs the first cleavase to a first genomic locus; and (c) a second guide RNA that directs the second cleavase to a second genomic locus, wherein the second genomic locus is different from the first genomic locus.

[0308] In some embodiments, a composition is provided, the composition comprising (a) a polynucleotide comprising an open reading frame (ORF) encoding a fusion protein, wherein the fusion protein comprises a first cleavase and a second cleavase; and (b) a first guide RNA that directs the first cleavase to a first genomic locus; and (c) a second guide RNA that directs the second cleavase to a second genomic locus, wherein the second genomic locus is different from the first genomic locus.

[0309] In some embodiments, a composition is provided, the composition comprising (a) a first polynucleotide comprising an ORF encoding the first polypeptide, wherein the first polypeptide comprises first cleavase and a first intein, wherein the first cleavase is a S. pyogenes (Spy)Cas9 cleavase, said SpyCas9 cleavase comprising a R1333K mutation within its protospacer adjacent motif recognition domain; (b) a second polynucleotide comprising an ORF encoding the second polypeptide, wherein the second polypeptide comprises a second cleavase and a second intein capable of binding the first intein, wherein the second cleavase is a N. meningitidis (Nme)Cas9 cleavase, a C. jejuni (Cje) Cas9 cleavase, or a Simonsiella muelleri (Smu) Cas9 cleavase; and wherein the first polypeptide binds to the second polypeptide through intein catalysis.

[0310] The section headings used herein are for organizational purposes only and are not to be construed as limiting the desired subject matter in any way. In the event that any material incorporated by reference contradicts any term defined in this specification or any other express content of this specification, this specification controls. While the present teachings are described in conjunction with various embodiments, it is not intended that the present teachings be limited to such embodiments. On the contrary, the present teachings encompass various alternatives, modifications, and equivalents, as will be appreciated by those of skill in the art.

### I. Definitions

[0311] Unless stated otherwise, the following terms and phrases as used herein are intended to have the following meanings:

[0312] “Polynucleotide” and “nucleic acid” are used herein to refer to a multimeric compound comprising nucleosides or nucleoside analogs which have nitrogenous heterocyclic bases or base analogs linked together along a backbone, including conventional RNA, DNA, mixed RNA-DNA, and polymers that are analogs thereof. A nucleic acid “backbone” can be made up of a variety of linkages, including one or more of sugar-phosphodiester linkages, peptide-nucleic acid bonds (“peptide nucleic acids” or PNA; PCT No. WO 95/32305), phosphorothioate linkages, methylphosphonate linkages, or combinations thereof. Sugar moieties of a nucleic acid can be ribose, deoxyribose, or similar compounds with substitutions, e.g., 2′ methoxy, 2′ halide, or 2′-O-(2-methoxyethyl) (2′-O-moe) substitutions. Nitrogenous bases can be conventional bases (A, G, C, T, U), analogs thereof (e.g., modified uridines such as 5-methoxyuridine, pseudouridine, or N1-methylpseudouridine, or others); inosine; derivatives of purines or pyrimidines (e.g., N⁴-methyl deoxyguanosine, deaza- or aza-purines, deaza- or aza-pyrimidines, pyrimidine bases with substituent groups at the 5 or 6 position (e.g., 5-methylcytosine), purine bases with a substituent at the 2, 6, or 8 positions, 2-amino-6-methylaminopurine, O⁶-methylguanine, 4-thio-pyrimidines, 4-amino-pyrimidines, 4-dimethylhydrazine-pyrimidines, and O⁴-alkyl-pyrimidines; U.S. Pat. No. 5,378,825 and PCT No. WO 93/13121). For general discussion see The Biochemistry of the Nucleic Acids 5-36, Adams et al., ed., 11^{th} ed., 1992). Nucleic acids can include one or more “abasic” residues where the backbone includes no nitrogenous base for position(s) of the polymer (U.S. Pat. No. 5,585,481). A nucleic acid can comprise only conventional RNA or DNA sugars, bases and linkages, or can include both conventional components and substitutions (e.g., conventional bases with 2′ methoxy linkages, or polymers containing both conventional bases and one or more base analogs). Nucleic acid includes “locked nucleic acid” (LNA), an analogue containing one or more LNA nucleotide monomers with a bicyclic furanose unit locked in an RNA mimicking sugar conformation, which enhance hybridization affinity toward complementary RNA and DNA sequences (Vester and Wengel, 2004, Biochemistry 43(42):13233-41). Nucleic acid includes “unlocked nucleic acid” enables the modulation of the thermodynamic stability and also provides nuclease stability. RNA and DNA have different sugar moieties and can differ by the presence of uracil or analogs thereof in RNA and thymine or analogs thereof in DNA.

[0313] “Polypeptide” as used herein refers to a multimeric compound comprising amino acid residues that can adopt a three-dimensional conformation. Polypeptides include but are not limited to enzymes, enzyme precursor proteins, regulatory proteins, structural proteins, receptors, nucleic acid binding proteins, antibodies, etc. Polypeptides may, but do not necessarily, comprise post-translational modifications, non-natural amino acids, prosthetic groups, and the like.

[0314] As used herein, “ribonucleoprotein” (RNP) or “RNP complex” refers to a guide RNA together with an RNA-guided DNA binding agent, such as a Cas nuclease, e.g., a Cas cleavase, Cas nickase, or dCas DNA binding agent (e.g., Cas9). In some embodiments, the guide RNA guides the RNA-guided DNA binding agent such as Cas9 to a target sequence, and the guide RNA hybridizes with the target sequence and the agent binds to the target sequence; in cases where the agent is a cleavase or nickase, binding can be followed by cleaving or nicking.

[0315] As used herein, “Cas nuclease”, also called “Cas protein” as used herein, encompasses Cas cleavases, Cas nickases, and dCas DNA binding agents. Cas cleavases/nickases and dCas DNA binding agents include a Csm or Cmr complex of a type III CRISPR system, the Cas10, Csm1, or Cmr2 subunit thereof, a Cascade complex of a type I CRISPR system, the Cas3 subunit thereof, and Class 2 Cas nucleases. As used herein, a “Class 2 Cas nuclease” is a single-chain polypeptide with RNA-guided DNA binding activity. Class 2 Cas nucleases include Class 2 Cas cleavases, Class 2 Cas nickases (e.g., H840A, D10A, or N863A variants), which further have RNA-guided DNA cleavases or nickase activity, and Class 2 dCas DNA binding agents, in which cleavase/nickase activity is inactivated. Class 2 Cas nucleases include, for example, Cas9, Cpf1, C2c1, C2c2, C2c3, HF Cas9 (e.g., N497A, R661A, Q695A, Q926A variants), HypaCas9 (e.g., N692A, M694A, Q695A, H698A variants), eSPCas9(1.0) (e.g., K810A, K1003A, R1060A variants), and eSPCas9(1.1) (e.g., K848A, K1003A, R1060A variants) proteins and modifications thereof. Cpf1 protein, Zetsche et al., Cell, 163: 1-13 (2015), is homologous to Cas9, and contains a RuvC-like nuclease domain. Cpf1 sequences of Zetsche are incorporated by reference in their entirety. See, e.g., Zetsche, Tables S1 and S3. See, e.g., Makarova et al., Nat Rev Microbiol, 13(11): 722-36 (2015); Shmakov et al., Molecular Cell, 60:385-397 (2015).

[0316] As used herein, the term “orthogonal” refers to any two genomic editors (e.g., base editors, nucleases, nickases, or cleavases) where each is capable of recognizing its own target(s) via its cognate guide RNA(s) but not compatible with the guide RNA(s) cognate to the other genomic editor, e.g., each is not capable of recognizing the target(s) of the other genomic editor via the guide RNA(s) cognate to the other genomic editor. For example, an N. meningitidis Cas9 (NmeCas9) cleavase may be capable of recognizing a genomic locus via a guide RNA cognate to the NmeCas9 cleavase, and an S. pyogenes Cas9 (SpyCas9) cleavase may be capable of recognizing another genomic locus via a guide RNA cognate to the SpyCas9 cleavase. In this example, the NmeCas9 cleavase and the SpyCas9 cleavase are orthogonal to each other. Genome editors or genome editing components may be engineered to be orthogonal. Although in this example, the NmeCas9 cleavase and the SpyCas9 cleavase are derived from different organisms, two genomic editors need not be derived from different organisms to be orthogonal to each other.

[0317] As used herein, the term “fusion protein” refers to a hybrid polypeptide which comprises polypeptides from at least two different proteins or sources. One polypeptide may be located at the amino-terminal (N-terminal) portion of the fusion protein or at the carboxy-terminal (C-terminal) protein thus forming an “amino-terminal fusion protein” or a “carboxy-terminal fusion protein,” respectively. Any of the proteins provided herein may be produced by any method known in the art. For example, the proteins provided herein may be produced via recombinant protein expression and purification, which is especially suited for fusion proteins comprising a peptide linker. Methods for recombinant protein expression and purification are well known, and include those described by Green and Sambrook, Molecular Cloning: A Laboratory Manual (4th ed., Cold Spring Harbor Laboratory Press, Cold Spring Harbor, N.Y. (2012)), the entire contents of which are incorporated herein by reference.

[0318] The term “intein,” as used herein refers to a protein domain capable of mediating a process known as protein splicing. For example, a first intein positioned at the C-terminus of a first polypeptide (the N-terminal intein) and a second intein positioned at the N-terminus of a second polypeptide (the C-terminal intein) may undergo a chemical reaction culminating in the formation of a peptide bond between the first polypeptide and the second polypeptide and the excision of the first and second intein domains. Intein-mediated protein splicing is known in the art, and represents a well-established technique for generating a single protein from two separate polypeptides (See, e.g., Shah and Muir. Inteins: Nature's Gift to Protein Chemists. Chem. Sci., 5(1), 446-461 (2014)).

[0319] The term “linker,” as used herein, refers to a chemical group or a molecule linking two adjacent molecules or moieties. Typically, the linker is positioned between, or flanked by, two groups, molecules, or other moieties and connected to each one via a covalent bond. In some embodiments, the linker is a peptide linker comprising an amino acid or a plurality of amino acids (e.g., a peptide or protein) such as a 16-amino acid residue “XTEN” linker, or a variant thereof (See, e.g., the Examples; and Schellenberger et al. A recombinant polypeptide extends the in vivo half-life of peptides and proteins in a tunable manner. Nat. Biotechnol. 27, 1186-1190 (2009)). In some embodiments, the XTEN linker comprises the sequence SGSETPGTSESATPES (SEQ ID NO: 301), SGSETPGTSESA (SEQ ID NO: 302), or SGSETPGTSESATPEGGSGGS (SEQ ID NO: 303). In some embodiments, the linker comprises one or more sequences selected from SEQ ID NOs: 150-158 and 304-365.

[0320] As used herein, the terms “nuclear localization signal” (NLS) or “nuclear localization sequence” refers to an amino acid sequence which induces transport of molecules comprising such sequences or linked to such sequences into the nucleus of eukaryotic cells. The nuclear localization signal may form part of the molecule to be transported. In some embodiments, the NLS may be fused to the molecule by a covalent bond, hydrogen bonds or ionic interactions. In some embodiments, the NLS may be fused to the molecule via a linker.

[0321] As used herein, “open reading frame” or “ORF” of a gene refers to a sequence consisting of a series of codons that specify the amino acid sequence of the protein that the gene codes for. The ORF generally begins with a start codon (e.g., ATG in DNA or AUG in RNA) and ends with a stop codon, e.g., TAA, TAG or TGA in DNA or UAA, UAG, or UGA in RNA.

[0322] “mRNA” is used herein to refer to a polynucleotide that is not DNA and comprises an open reading frame that can be translated into a polypeptide (i.e., can serve as a substrate for translation by a ribosome and amino-acylated tRNAs). mRNA can comprise one or more modifications, e.g., as provided below. In general, mRNAs do not contain a substantial quantity of thymidine residues (e.g., 0 residues or fewer than 30, 20, 10, 5, 4, 3, or 2 thymidine residues; or less than 10%, 9%, 8%, 7%, 6%, 5%, 4%, 4%, 3%, 2%, 1%, 0.5%, 0.2%, or 0.1% thymidine content). An mRNA can contain modified uridines at some or all of its uridine positions.

[0323] “Modified uridine” is used herein to refer to a nucleoside other than thymidine with the same hydrogen bond acceptors as uridine and one or more structural differences from uridine. In some embodiments, a modified uridine is a substituted uridine, i.e., a uridine in which one or more non-proton substituents (e.g., alkoxy, such as methoxy) takes the place of a proton. In some embodiments, a modified uridine is pseudouridine. In some embodiments, a modified uridine is a substituted pseudouridine, i.e., a pseudouridine in which one or more non-proton substituents (e.g., alkyl, such as methyl) takes the place of a proton. In some embodiments, a modified uridine is any of a substituted uridine, pseudouridine, or a substituted pseudouridine.

[0324] “Uridine position” as used herein refers to a position in a polynucleotide occupied by a uridine or a modified uridine. Thus, for example, a polynucleotide in which “100% of the uridine positions are modified uridines” contains a modified uridine at every position that would be a uridine in a conventional RNA (where all bases are standard A, U, C, or G bases) of the same sequence. Unless otherwise indicated, a U in a polynucleotide sequence of a sequence table or sequence listing in or accompanying this disclosure can be a uridine or a modified uridine.

[0325] As used herein, the “minimal uridine codon(s)” for a given amino acid is the codon(s) with the fewest uridines (usually 0 or 1 except for a codon for phenylalanine, where the minimal uridine codon has 2 uridines). Modified uridine residues are considered equivalent to uridines for the purpose of evaluating uridine content.

[0326] As used herein, the “uridine dinucleotide (UU) content” of an ORF can be expressed in absolute terms as the enumeration of UU dinucleotides in an ORF or on a rate basis as the percentage of positions occupied by the uridines of uridine dinucleotides (for example, AUUAU would have a uridine dinucleotide content of 40% because 2 of 5 positions are occupied by the uridines of a uridine dinucleotide). Modified uridine residues are considered equivalent to uridines for the purpose of evaluating uridine dinucleotide content.

[0327] As used herein, the “minimal adenine codon(s)” for a given amino acid is the codon(s) with the fewest adenines (usually 0 or 1 except for a codon for lysine and asparagine, where the minimal adenine codon has 2 adenines). Modified adenine residues are considered equivalent to adenines for the purpose of evaluating adenine content.

[0328] As used herein, the “adenine dinucleotide content” of an ORF can be expressed in absolute terms as the enumeration of AA dinucleotides in an ORF or on a rate basis as the percentage of positions occupied by the adenines of adenine dinucleotides (for example, UAAUA would have an adenine dinucleotide content of 40% because 2 of 5 positions are occupied by the adenines of an adenine dinucleotide). Modified adenine residues are considered equivalent to adenines for the purpose of evaluating adenine dinucleotide content.

[0329] “Guide RNA”, “gRNA”, and “guide” are used herein interchangeably to refer to either a crRNA (also known as CRISPR RNA), or the combination of a crRNA and a trRNA (also known as tracrRNA). The crRNA and trRNA may be associated as a single RNA molecule (single guide RNA, sgRNA) or in two separate RNA molecules (dual guide RNA, dgRNA). “Guide RNA” or “gRNA” refers to each type. The trRNA may be a naturally-occurring sequence, or a trRNA sequence with modifications or variations compared to naturally-occurring sequences.

[0330] As used herein, the term “genomic locus,” when used in the context of a genomic locus being targeted by a guide RNA, includes one or more parts of a genome, the targeting of which affects the expression of the gene that is associated with the locus. For example, a genomic locus may include a coding sequence of a gene, an intron sequence of a gene, a regulatory sequence, a transcriptional control sequence of a gene, a translational control sequence of a gene, a splicing site, or a non-coding sequence between genes (e.g., intergenic space).

[0331] As used herein, a “guide sequence” or “guide region” or “targeting sequence” or “spacer” or “spacer sequence” and the like refers to a sequence within a gRNA that is complementary to a target sequence and functions to direct a gRNA to a target sequence for binding or modification (e.g., cleavage) by an RNA-guided nickase. A guide sequence can be 20 nucleotides in length, e.g., in the case of Streptococcus pyogenes (i.e., Spy Cas9 (also referred to as SpCas9)) and related Cas9 homologs/orthologs. Shorter or longer sequences can also be used as guides, e.g., 15-, 16-, 17-, 18-, 19-, 21-, 22-, 23-, 24-, or 25-nucleotides in length. A guide sequence can be 20-25 nucleotides in length, e.g., in the case of Nme Cas9, e.g., 20-, 21-, 22-, 23-, 24- or 25-nucleotides in length. For example, a guide sequence of 24 nucleotides in length can be used with Nme Cas9, e.g., Nme2 Cas9.

[0332] In some embodiments, the target sequence is in a genomic locus or on a chromosome, for example, and is complementary to the guide sequence. In some embodiments, the degree of complementarity or identity between a guide sequence and its corresponding target sequence may be about 75%, about 80%, about 85%, about 90%, about 95%, or 100%. In some embodiments, the guide sequence and the target region may be 100% complementary or identical. In other embodiments, the guide sequence and the target region may contain at least one mismatch. For example, the guide sequence and the target sequence may contain 1, 2, 3, or 4 mismatches, where the total length of the target sequence is at least 17, at least 18, at least 19, at least 20 or more base pairs. In some embodiments, the guide sequence and the target region may contain 1-4 mismatches where the guide sequence comprises at least 17, at least 18, at least 19, at least 20 or more nucleotides. In some embodiments, the guide sequence and the target region may contain 1, 2, 3, or 4 mismatches where the guide sequence comprises 20 nucleotides. In some embodiments, the degree of complementarity or identity between a guide sequence and its corresponding target sequence is at least 80%, at least 85%, at least 90%, or at least 95%, for example when, the guide sequence comprises a sequence 24 contiguous nucleotides. In some embodiments, the guide sequence and the target region may be 100% complementary or identical. In other embodiments, the guide sequence and the target region may contain at least one mismatch, i.e., one nucleotide that is not identical or not complementary, depending on the reference sequence. For example, the guide sequence and the target sequence may contain 1-2, preferably no more than 1 mismatch, where the total length of the target sequence is 19, 20, 21, 22, 23, or 24, nucleotides, or more. In some embodiments, the guide sequence and the target region may contain 1-2 mismatches where the guide sequence comprises at least 24 nucleotides, or more. In some embodiments, the guide sequence and the target region may contain 1-2 mismatches where the guide sequence comprises 24 nucleotides.

[0333] As used herein, a “target sequence” or “genomic target sequence” refers to a sequence of nucleic acid in a target genomic locus, in either the positive or the negative strand, that has complementarity to the guide sequence of the gRNA, i.e., that is sufficiently complementary to the guide sequence of the gRNA to permit specific binding of the guide to the target sequence. The interaction of the target sequence and the guide sequence directs an RNA-guided DNA binding agent to bind, and potentially nick or cleave (depending on the activity of the agent), within the target sequence. The specific length of the target sequence and the number of mismatches possible between the target sequence and the guide sequence depend, for example, on the identity of the Cas9 nuclease being directed by the gRNA. Target sequences for Cas proteins include both the positive and negative strands of genomic DNA (i.e., the sequence given and the sequence's reverse complement), as a nucleic acid substrate for a Cas protein is a double stranded nucleic acid. Accordingly, where a guide sequence is said to be “complementary to a target sequence,” it is to be understood that the guide sequence may direct an RNA-guided DNA binding agent (e.g., dCas9 or impaired Cas9) to bind to the reverse complement of a target sequence. Thus, in some embodiments, where the guide sequence binds the reverse complement of a target sequence, the guide sequence is identical to certain nucleotides of the target sequence (e.g., the target sequence not including the PAM) except for the substitution of U for T in the guide sequence.

[0334] As used herein, a first sequence is considered to “comprise a sequence that is at least X % identical to” a second sequence if an alignment of the first sequence to the second sequence shows that X % or more of the positions of the second sequence in its entirety are matched by the first sequence. For example, the sequence AAGA comprises a sequence with 100% identity to the sequence AAG because an alignment would give 100% identity in that there are matches to all three positions of the second sequence. The differences between RNA and DNA (generally the exchange of uridine for thymidine or vice versa) and the presence of nucleoside analogs such as modified uridines do not contribute to differences in identity or complementarity among polynucleotides as long as the relevant nucleotides (such as thymidine, uridine, or modified uridine) have the same complement (e.g., adenosine for all of thymidine, uridine, or modified uridine; another example is cytosine and 5-methylcytosine, both of which have guanosine as a complement). Thus, for example, the sequence 5′-AXG where X is any modified uridine, such as pseudouridine, N1-methyl pseudouridine, or 5-methoxyuridine, is considered 100% identical to AUG in that both are perfectly complementary to the same sequence (5′-CAU). Exemplary alignment algorithms are the Smith-Waterman and Needleman-Wunsch algorithms, which are well-known in the art. One skilled in the art will understand what choice of algorithm and parameter settings are appropriate for a given pair of sequences to be aligned; for sequences of generally similar length and expected identity >50% for amino acids or >75% for nucleotides, the Needleman-Wunsch algorithm with default settings of the Needleman-Wunsch algorithm interface provided by the EBI at the www.ebi.ac.uk web server is generally appropriate.

[0335] As used herein, the term “contact” refers to providing at least one component so that the component physically contacts a cell, including physically contacting the cell surface, cytosol, and/or nucleus of the cell. “Contacting” a cell with a polypeptide encompasses, for example, contacting the cell with a nucleic acid that encodes the polypeptide and allowing the cell to express the polypeptide.

[0336] As used herein, “indel” refers to an insertion or deletion mutation consisting of a number of nucleotides that are either inserted, deleted, or inserted and deleted, e.g., at the site of double-strand breaks (DSBs), in a target nucleic acid. As used herein, when indel formation results in an insertion, the insertion is a random insertion at the site of a DSB and is not generally directed by or based on a template sequence.

[0337] As used herein, an “excision” is defined as a single long deletion that starts within the indel window of one guide RNA and ends within the indel window of the other guide RNA.

[0338] As used herein, “inversion” refers to a mutation in which a DNA sequence flanked by two double-strand breaks (DSBs) is reinserted back into the chromosome in the opposite orientation. Inversion may occur following the simultaneous or near-simultaneous generation of two adjacent D SBs.

[0339] As used herein, “reduces or eliminates” (or “reduced or eliminated”) expression of a protein on a cell refers to a partial or complete loss of expression of the protein relative to an unmodified cell. In some embodiments, the surface expression of a protein on a cell is measured by flow cytometry and has “reduced or eliminated” surface expression relative to an unmodified cell as evidenced by a reduction in fluorescence signal upon staining with the same antibody against the protein. A cell that has “reduced or eliminated” surface expression of a protein by flow cytometry relative to an unmodified cell may be referred to as “negative” for expression of that protein as evidenced by a fluorescence signal similar to a cell stained with an isotype control antibody. The “reduction or elimination” of protein expression can be measured by other known techniques in the field with appropriate controls known to those skilled in the art. As used herein, “eliminated” expression is understood as a reduction of expression to below the level of detection of the protein by the method used.

[0340] As used herein, “increased” (or “increases”) expression of a protein on a cell refers to an increase in expression of the protein relative to an unmodified cell. In some embodiments, the surface expression of a protein on a cell is measured by flow cytometry and has “increased” surface expression relative to an unmodified cell as evidenced by an increase in fluorescence signal upon staining with the same antibody against the protein. The “increase” of protein expression can be measured by other known techniques in the field with appropriate controls known to those skilled in the art.

[0341] As used herein, “knockdown” refers to a decrease in expression of a particular gene product (e.g., protein, mRNA, or both). Knockdown of a protein can be measured either by detecting protein secreted by tissue or population of cells (e.g., in serum or cell media) or by detecting total cellular amount of the protein from a tissue or cell population of interest. Methods for measuring knockdown of mRNA are known and include sequencing of mRNA isolated from a tissue or cell population of interest. In some embodiments, “knockdown” may refer to some loss of expression of a particular gene product, for example a decrease in the amount of mRNA transcribed or a decrease in the amount of protein expressed or secreted by a population of cells (including in vivo populations such as those found in tissues).

[0342] As used herein, “knockout” refers to a loss of expression of a particular protein in a cell. Knockout can be measured either by detecting the amount of protein secretion from a tissue or population of cells (e.g., in serum or cell media) or by detecting total cellular amount of a protein a tissue or a population of cells. In some embodiments, the methods of the disclosure “knockout” a target protein one or more cells (e.g., in a population of cells including in vivo populations such as those found in tissues). In some embodiments, a knockout is not the formation of mutant of the target protein, for example, created by indels, but rather the complete loss of expression of the target protein in a cell, i.e., decrease of expression to below the level of detection of the assay used.

[0343] As used herein, a “population of cells comprising edited cells” (or “population of cells comprising engineered cells”) or the like refers to a cell population that comprises edited cells (or engineered cells), however not all cells in the population must be edited. A cell population comprising edited cells may also include non-edited cells. The percentage of edited cells within a cell population comprising edited cells may be determined by counting the number of cells within the population that are edited in the population as determined by standard cell counting methods. For example, in some embodiments, a cell population comprising edited cells comprising a single genome edit will have at least 20%, at least 30%, at least 40%, preferably at least 50%, at least 60%, at least 70%, at least 80%, at least 90%, at least 95%, or at least 99% of the cells in the population with the single edit. In some embodiments, a cell population comprising edited cells comprising at least two genome edits will have at least 20%, at least 30%, at least 40%, at least 50%, at least 60%, at least 70%, at least 80%, at least 90%, or at least 95% of the cells in the population with at least two genome edits.

[0344] As used herein, “TTR” refers to the TTR gene (NCBI Gene ID: 7276; Ensembl: ENSG00000118271), which encodes the protein transthyretin (TTR).

[0345] As used herein, “treatment” refers to any administration or application of a therapeutic for disease or disorder in a subject, and includes inhibiting the disease, arresting its development, relieving one or more symptoms of the disease, curing the disease, or preventing one or more symptoms of the disease, including reoccurrence of the symptom.

[0346] As used herein, “delivering” and “administering” are used interchangeably, and include ex vivo and in vivo applications.

[0347] Co-administration, as used herein, means that a plurality of substances are administered sufficiently close together in time so that the agents act together. Co-administration encompasses administering substances together in a single formulation and administering substances in separate formulations close enough in time so that the agents act together.

[0348] As used herein, the phrase “pharmaceutically acceptable” means that which is useful in preparing a pharmaceutical composition that is generally non-toxic and is not biologically undesirable and that are not otherwise unacceptable for pharmaceutical use. Pharmaceutically acceptable generally refers to substances that are non-pyrogenic. Pharmaceutically acceptable can refer to substances that are sterile, especially for pharmaceutical substances that are for injection or infusion.

[0349] As used herein, a “subject” refers to any member of the animal kingdom. In some embodiments, “subject” refers to humans. In some embodiments, “subject” refers to non-human animals. In some embodiments, “subject” refers to primates. In some embodiments, a subject may be a transgenic animal, genetically engineered animal, or a clone. In certain embodiments of the present invention the subject is an adult, an adolescent, or an infant. In some embodiments, terms “individual” or “patient” are used and are intended to be interchangeable with “subject”.

[0350] The term “about” or “approximately” means an acceptable error for a particular value as determined by one of ordinary skill in the art, which depends in part on how the value is measured or determined, or a degree of variation that does not substantially affect the properties of the described subject matter, or within the tolerances accepted in the art, e.g., within 10%, 5%, 2%, or 1% or within two standard deviations of a set of values. Accordingly, unless indicated to the contrary, the numerical parameters set forth in the following specification and attached claims are approximations that may vary depending upon the desired properties sought to be obtained. At the very least, and not as an attempt to limit the application of the doctrine of equivalents to the scope of the claims, each numerical parameter should at least be construed in light of the number of reported significant digits and by applying ordinary rounding techniques.

[0351] Before describing the present teachings in detail, it is to be understood that the disclosure is not limited to specific compositions or process steps, as such may vary. It should be noted that, as used in this specification and the appended claims, the singular form “a”, “an” and “the” include plural references unless the context clearly dictates otherwise. Thus, for example, reference to “a conjugate” includes a plurality of conjugates and reference to “a cell” includes a plurality of cells and the like.

[0352] Numeric ranges are inclusive of the numbers defining the range. Measured and measurable values are understood to be approximate, taking into account significant digits and the error associated with the measurement. Also, the use of “comprise”, “comprises”, “comprising”, “contain”, “contains”, “containing”, “include”, “includes”, and “including” are not intended to be limiting. It is to be understood that both the foregoing general description and detailed description are exemplary and explanatory only and are not restrictive of the teachings.

[0353] Unless specifically noted in the specification, embodiments in the specification that recite “comprising” various components are also contemplated as “consisting of” or “consisting essentially of” the recited components; embodiments in the specification that recite “consisting of” various components are also contemplated as “comprising” or “consisting essentially of” the recited components; and embodiments in the specification that recite “consisting essentially of” various components are also contemplated as “consisting of” or “comprising” the recited components (this interchangeability does not apply to the use of these terms in the claims).

[0354] The term “or” is used in an inclusive sense, i.e., equivalent to “and/or,” unless the context clearly indicates otherwise.

[0355] As used herein, ranges include both the upper and lower limit.

[0356] In the event of a conflict between a sequence in the application and an indicated accession number or position in an accession number, the sequence in the application predominates.

[0357] Reference will now be made in detail to certain embodiments of the invention, examples of which are illustrated in the accompanying drawings. While the invention is described in conjunction with the illustrated embodiments, it will be understood that they are not intended to limit the invention to those embodiments. On the contrary, the invention is intended to cover all alternatives, modifications, and equivalents, which may be included within the invention as defined by the appended claims and included embodiments.

### II. Cas9-Cas9 Fusion Protein

[0358] The Cas9-Cas9 fusion system may use both Cas9 domains to achieve coordinated cleavage at two neighboring positions within the genome. For example, attenuated SpyCas9 cleavase can be coupled to NmeCas9 cleavase to allow the formation two double-strand breaks together and provide clear excision of the intervening sequence.

[0359] In some embodiments, the fusion protein (or “Cas9-Cas9 fusion”) disclosed herein comprises (a) a first Cas9 cleavase and a guide RNA (gRNA) that targets at least one genomic locus and that is cognate to the first Cas9 cleavase; and (b) a second Cas9 cleavase and a gRNA that targets at least one genomic locus and that is cognate to the second Cas9 cleavase, thereby excising a DNA sequence between a first cleavage site cleaved by the first cleavase and a second cleavage site cleaved by the second cleavase. In some embodiments, the fusion protein is delivered to the cell as at least one polypeptide or at least one mRNA.

[0360] In some embodiments, a polynucleotide comprising an open reading frame (ORF) encoding a fusion protein is provided. In some embodiments, the fusion protein comprises a first cleavase and a second cleavase, wherein: the first cleavase is a S. pyogenes (Spy)Cas9 cleavase, said SpyCas9 cleavase comprising a R1333K mutation within its protospacer adjacent motif recognition domain; and the second cleavase is a N. meningitidis (Nme)Cas9 cleavase, a C. jejuni (Cje) Cas9 cleavase, or a Simonsiella muelleri (Smu) Cas9 cleavase.

[0361] In some embodiments, a composition is provided, the composition comprising (a) a polynucleotide comprising an open reading frame (ORF) encoding a fusion protein, wherein the fusion protein comprises a first cleavase and a second cleavase, wherein: the first cleavase is a S. pyogenes (Spy)Cas9 cleavase, said SpyCas9 cleavase comprising a R1333K mutation within its protospacer adjacent motif recognition domain; and the second cleavase is a N. meningitidis (Nme)Cas9 cleavase, a C. jejuni (Cje) Cas9 cleavase, or a Simonsiella muelleri (Smu) Cas9 cleavase; and (b) a first guide RNA that directs the first cleavase to a first genomic locus; and (c) a second guide RNA that directs the second cleavase to a second genomic locus, wherein the second genomic locus is different from the first genomic locus.

[0362] In some embodiments, a composition is provided, the composition comprising (a) a first polynucleotide comprising an ORF encoding the first polypeptide, wherein the first polypeptide comprises first cleavase and a first intein, wherein the first cleavase is a S. pyogenes (Spy)Cas9 cleavase, said SpyCas9 cleavase comprising a R1333K mutation within its protospacer adjacent motif recognition domain; (b) a second polynucleotide comprising an ORF encoding the second polypeptide, wherein the second polypeptide comprises a second cleavase and a second intein capable of binding the first intein, wherein the second cleavase is a N. meningitidis (Nme)Cas9 cleavase, a C. jejuni (Cje) Cas9 cleavase, or a Simonsiella muelleri (Smu) Cas9 cleavase; and wherein the first polypeptide binds to the second polypeptide through intein catalysis.

[0363] In some embodiments, the first cleavase is located N-terminal to the second cleavase. In some embodiments, the first cleavase is located C-terminal to the second cleavase.

### A. First Cleavase: Attenuated SpyCas9

[0364] In some embodiment, the present disclose provides an attenuated SpCas9 comprising a mutation in its protospacer adjacent motif (PAM) recognition domain. In some embodiments, the SpyCas9 may have an attenuated DNA-binding activity. Exemplary mutations in the PAM-interacting domain include R1333S, R1333K, and R1335K. See also WO2016106338; Nishimasu et al., Crystal structure of Cas9 in complex with guide RNA and target DNA. Cell. 2014 Feb. 27; 156(5):935-49; and Anders et al., Structural basis of PAM-dependent target DNA recognition by the Cas9 endonuclease. Nature. 2014 Sep. 25; 513(7519):569-73, the contents of all of which are incorporated by reference herein.

[0365] In some embodiments, the first cleavase comprises a R1333K mutation within its PAM recognition domain.

[0366] In some embodiments, the SpyCas9 cleavase comprises an amino acid sequence of SEQ ID NO: 105 or an amino acid sequence that is at least 85%, at least 90%, or at least 95% identical to SEQ ID NO: 105. In some embodiments, the nucleotide encoding the SpyCas9 cleavase comprises an open reading frame (ORF) comprising a sequence of SEQ ID NO: 104 or a nucleotide sequence that is at least 85, at least 90%, or at least 95% identical to SEQ ID NO: 104.

### B. Second Cas9 Cleavase

[0367] In some embodiments, the fusion protein disclosed herein comprises a second Cas9 cleavase. The second Cas9 may be Class II-C Cas9 orthologs. Non-limiting examples of Class II-C Cas9s include N. meningitidis (NmeCas9), C. jejuni Cas9 (CjeCas9), or S. muelleri (Smu) Cas9.

[0368] In some embodiments, the Cas9 is an Nme1Cas9, an Nme2Cas9, an Nme3Cas9. In some embodiments, the second cleavase is a NmeCas9 cleavase. In some embodiments, the second cleavase is an Nme1Cas9, an Nme2Cas9, or an Nme3Cas9. In some embodiments, the second cleavase is an Nme2Cas9.

[0369] In some embodiments, the second cleavase is a CjeCas9. In some embodiments, the second cleavase is a SmuCas9.

[0370] In some embodiments, the NmeCas9 cleavase comprises an amino acid sequence of any one of SEQ ID NO: 22, 107, 109, 120, 127, 136, or 137 or an amino acid sequence that is at least 85%, at least 90%, at least 95% identical to any one of SEQ ID NO: 22, 107, 109, 120, 127, 136, or 137.

[0371] In some embodiments, the nucleotide encoding the NmeCas9 cleavase comprises a nucleotide sequence of any one of SEQ ID NO: 21, 106, 108, 121-126, 128-133, 134, 135, 138, or 139; or a nucleotide sequence that is at least 85%, at least 90%, or at least 95% identical to any one of SEQ ID NO: SEQ ID NO: 21, 106, 108, 121-126, 128-133, 134, 135, 138, or 139.

[0372] In some embodiments, the NmeCas9 cleavase is a Nme2Cas9 comprises an amino acid sequence of any one of SEQ ID NO: 22, 109, or 136 or an amino acid sequence that is at least 85%, at least 90%, at least 95% identical to any one of SEQ ID NO: 22, 109, or 136; or (b) the nucleotide encoding the NmeCas9 cleavase comprises a nucleotide sequence of any one of SEQ ID NO: 21, 108, or 138; or a nucleotide sequence that is at least 85%, at least 90%, or at least 95% identical to any one of SEQ ID NO: 21, 108, or 138.

[0373] In some embodiments, the CjeCas9 cleavase comprises an amino acid sequence of SEQ ID NO: 144; or an amino acid sequence that is at least 85%, at least 90%, or at least 95% identical to SEQ ID NO: 144. In some embodiments, the nucleotide encoding the CjeCas9 cleavase comprises a sequence of SEQ ID NO: 143 or a nucleotide sequence that is at least 85%, at least 90%, or at least 95% identical to SEQ ID NO: 143.

[0374] In some embodiments, the SmuCas9 cleavase comprises an amino acid sequence of SEQ ID NO: 142; or an amino acid sequence that is at least 85%, at least 90%, or at least 95% identical to SEQ ID NO: 142. In some embodiments, the nucleotide encoding the SmuCas9 cleavase comprises an open reading frame (ORF) comprising a sequence of SEQ ID NO: 140 or 141 or a nucleotide sequence that is at least 85%, at least 90%, or at least 95% identical to SEQ ID NO: 140 or 141.

### C. Linkers

[0375] In some embodiments, the fusion protein described herein further comprises a linker between the first cleavase and the second cleavase. In some embodiments, the linker is an organic molecule, polymer, or chemical moiety. In some embodiments, the linker is a peptide linker. In some embodiments, the nucleic acid encoding the polypeptide comprising the first cleavase or the second cleavase further comprises a sequence encoding the peptide linker.

[0376] In some embodiments, the peptide linker is any stretch of amino acids having at least 1, at least 2, at least 3, at least 4, at least 5, at least 6, at least 7, at least 8, at least 9, at least 10, at least 15, at least 20, at least 25, at least 30, at least 40, at least 50, or more amino acids.

[0377] In some embodiments, the peptide linker is any stretch of amino acids having at least 11, at least 21, at least 31, at least 41, at least 51, at least 61, at least 71, at least 81, or at least 91 amino acids.

[0378] In some embodiments, the fusion protein comprises a peptide linker between the first cleavase and the second cleavase. In some embodiments, the fusion protein comprises a peptide linker between the first cleavase and the second cleavase and the peptide linker comprises at least 10, at least 20, at least 30, at least 40, at least 50, at least 60, at least 70, at least 80 amino acids.

[0379] In some embodiments, the fusion protein comprises a peptide linker between the first cleavase and the second cleavase and the peptide linker comprises 11, 21, 31, 41, 51, 61, 71, or 81 amino acid residues.

[0380] In some embodiments, the fusion protein comprises a peptide linker between the first cleavase and the second cleavase and the peptide linker comprises an amino acid sequence of any one of SEQ ID NOs: 150-158; or an amino acid sequence is at least 85%, at least 90%, or at least 95% identical to any one of SEQ ID NOs: 150-158.

[0381] Other types of peptide linkers may be used herein. The peptide lunker may be the 16 residue “XTEN” linker, or a variant thereof (See, e.g., Schellenberger et al. A recombinant polypeptide extends the in vivo half-life of peptides and proteins in a tunable manner. Nat. Biotechnol. 27, 1186-1190 (2009)). In some embodiments, the XTEN linker comprises a sequence that is any one of SGSETPGTSESATPES (SEQ ID NO: 301), SGSETPGTSESA (SEQ ID NO: 302), or SGSETPGTSESATPEGGSGGS (SEQ ID NO: 303). In some embodiments, the XTEN linker consists of the sequence SGSETPGTSESATPES (SEQ ID NO: 301), SGSETPGTSESA (SEQ ID NO: 302), or SGSETPGTSESATPEGGSGGS (SEQ ID NO: 303).

[0382] In some embodiments, the peptide linker comprises a (GGGGS)ₙ (e.g., SEQ ID NOs: 305, 309-311, 314-318, 320-331, or 333-359), a (G)ₙ, an (EAAAK)ₙ (e.g., SEQ ID NOs: 306, 310-312, 315-318, 320-331, or 334-360), a (GGS)ₙ, an SGSETPGTSESATPES (SEQ ID NO: 301) motif (see, e.g., Guilinger J P, Thompson D B, Liu D R. Fusion of catalytically inactive Cas9 to FokI nuclease improves the specificity of genome modification. Nat. Biotechnol. 2014; 32(6): 577-82; the entire contents are incorporated herein by reference), or an (XP)ₙ motif, or a combination of any of these, wherein n is independently an integer between 1 and 30. See, WO2015089406, e.g., paragraph [0012], the entire content of which is incorporated herein by reference.

[0383] In some embodiments, the peptide linker comprises one or more sequences selected from SEQ ID NOs: 150-158 and 301-365. In some embodiments, the peptide linker comprises a sequence of SEQ ID NO: 150. In some embodiments, the peptide linker comprises a sequence of SEQ ID NO: 151. In some embodiments, the peptide linker comprises a sequence of SEQ ID NO: 152. In some embodiments, the peptide linker comprises a sequence of SEQ ID NO: 153. In some embodiments, the peptide linker comprises a sequence of SEQ ID NO: 154. In some embodiments, the peptide linker comprises a sequence of SEQ ID NO: 155. In some embodiments, the peptide linker comprises a sequence of SEQ ID NO: 156. In some embodiments, the peptide linker comprises a sequence of SEQ ID NO: 157. In some embodiments, the peptide linker comprises a sequence of SEQ ID NO: 158. In some embodiments, the peptide linker comprises one or more sequences selected from SEQ ID NO: 301, SEQ ID NO: 302, SEQ ID NO: 303, SEQ ID NO: 361, SEQ ID NO: 362, SEQ ID NO: 363. SEQ ID NO: 364 and SEQ ID NO: 365. In some embodiments, the peptide linker comprises a sequence of SEQ ID NO: 361.

### D. Nuclear Localization Signals (NLS)

[0384] In some embodiments, the heterologous functional domain may facilitate transport of the fusion protein disclosed herein into the nucleus of a cell. For example, the heterologous functional domain may be a nuclear localization signal (NLS). In some embodiments, the fusion protein comprises a nuclear localization signal (NLS).

[0385] In some embodiments, the fusion protein may be fused with 1-10 NLS(s). In some embodiments, the fusion protein disclosed herein may be fused with 1-5 NLS(s). In some embodiments, the fusion protein may be fused with one NLS.

[0386] Where one NLS is used, the NLS may be fused at the N-terminus or the C-terminus of the fusion protein. In some embodiments, the fusion protein disclosed herein may be fused C-terminally to at least one NLS. An NLS may also be inserted within the fusion protein. In other embodiments, the fusion protein may be fused with more than one NLS.

[0387] In some embodiments, the fusion protein may be fused with 2, 3, 4, or 5 NLSs. In some embodiments, the fusion protein may be fused with two NLSs. In certain circumstances, the two NLSs may be the same (e.g., two SV40 NLSs) or different. In some embodiments, the fusion protein is fused to two SV40 NLS sequences at the C-terminus. In some embodiments, the fusion protein may be fused with two NLSs, one at the N-terminus and one at the C-terminus. In some embodiments, the fusion protein may be fused with 3 NLSs.

[0388] In some embodiments, the fusion protein may be fused with no NLS.

[0389] In some embodiments, the NLS may be a monopartite sequence, such as, e.g., the SV40 NLS, for example, PKKKRKVE (SEQ ID NO: 366), KKKRKVE (SEQ ID NO: 367), PKKKRKV (SEQ ID NO: 371) or PKKKRRV (SEQ ID NO: 383). In some embodiments, the NLS may be a bipartite sequence, such as the NLS of nucleoplasmin, KRPAATKKAGQAKKKK (SEQ ID NO: 384). In a specific embodiment, a single PKKKRKV (SEQ ID NO: 371) NLS may be fused at the C-terminus of the first cleavase or the second cleavase. One or more linkers are optionally included at the fusion site (e.g., between fusion protein disclosed herein and NLS).

[0390] In some embodiments, one or more NLS(s) according to any of the foregoing embodiments are present in the fusion protein in combination with one or more additional heterologous functional domains, such as any of the heterologous functional domains described below.

[0391] In some embodiments, the fusion protein comprises a nuclear localization signal (NLS) and the NLS is present at the C-terminus of the fusion protein. In some embodiments, the fusion protein comprises a nuclear localization signal (NLS) and the NLS is present at the N-terminus of the fusion protein. In some embodiments, the fusion protein comprises a nuclear localization signal (NLS) and the NLS is present at both the N-terminus and C-terminus of the fusion protein. In some embodiments, the fusion protein comprises a nuclear localization signal (NLS) and the NLS is present between the first or second Cas9 protein and the linker sequence. In some embodiments, the fusion protein comprises a nuclear localization signal (NLS) and the NLS is present within the linker sequence. In some embodiments, the fusion protein comprises a nuclear localization signal (NLS) and the NLS is present between C-terminus of the first cleavase disclosed herein and the linker sequence. In some embodiments, the fusion protein comprises a nuclear localization signal (NLS) and the NLS is present between the C-terminus of the second cleavase disclosed herein and the linker sequence. In some embodiments, the fusion protein comprises a nuclear localization signal (NLS) and the NLS is present between N-terminus of the first cleavase disclosed herein and the linker sequence. In some embodiments, the fusion protein comprises a nuclear localization signal (NLS) and the NLS is present between N-terminus of the second cleavase disclosed herein and the linker sequence.

[0392] In some embodiments, the fusion protein comprises a nuclear localization signal (NLS), and wherein the NLS comprises a sequence having at least 80%, at least 85%, at least 90%, or at least 95% identity to any one of SEQ ID NOs: 366-369 and 371-384. In some embodiments, the fusion protein comprises one, two, or three nuclear localization signals (NLSs) independently selected from SEQ ID NOs: 366-369 and 371-384.

[0393] In some embodiments, the fusion protein comprises a nuclear localization signal (NLS), and wherein the NLS is encoded by a sequence having at least 80%, at least 85%, at least 90%, at least 95%, at least 98% or 100% identity to the sequence of any one of SEQ ID NOs: 370 and 385-397.

### E. Exemplary Cas9-Cas9 Fusion Protein

[0394] In some embodiments, the fusion protein comprises, from N-terminus to C-terminus: the first cleavase; a peptide linker, optionally wherein the linker comprises 81 amino acid residues; the second cleavase; and an NLS comprising an SV40 NLS.

[0395] In some embodiments, the fusion protein comprises, from N-terminus to C-terminus: a first NLS, wherein the first NLS comprises an SV40 NLS; the second cleavase; a peptide linker, optionally wherein the peptide linker comprises 41 amino acids; the first cleavase; a second NLS, wherein the second NLS comprising an SV40 NLS.

[0396] In some embodiments, the fusion protein comprises, from N-terminus to C-terminus: the second cleavase; a peptide linker, optionally wherein the peptide linker comprises 41 amino acids; the first cleavase; and an NLS, optionally wherein the NLS comprises an SV40 NLS. In some embodiments, the first cleavase comprises a SpyCas9. In some embodiments, the second cleavase comprises a CjeCas9, an SmuCas9, an Nme1Cas9, an Nme2Cas9, or an Nme3 Cas9.

[0397] In some embodiments, a fusion protein disclosed herein comprising (a) a first cleavase and a guide RNA (gRNA) that targets at least one genomic locus and that is cognate to the first cleavase; and (b) a second cleavase and a gRNA that targets at least one genomic locus and that is cognate to the second cleavase, wherein the first cleavase is orthogonal to the second cleavase is provided. In some embodiments, the first cleavase comprises a SpyCas9. In some embodiments, the second cleavase comprises a CjeCas9, an SmuCas9, an Nme1Cas9, an Nme2Cas9, or an Nme3 Cas9.

[0398] In some embodiments, a fusion protein disclosed herein comprising (a) a first cleavase and a guide RNA (gRNA) that targets at least one genomic locus and that is cognate to the first cleavase; and (b) a second cleavase and a gRNA that targets at least one genomic locus and that is cognate to the second cleavase, wherein the first cleavase is orthogonal to the second cleavase is provided. In some embodiments, the first cleavase comprises an R1333K SpyCas9. In some embodiments, the second cleavase comprises a CjeCas9, an SmuCas9, an Nme1Cas9, an Nme2Cas9, or an Nme3Cas9.

[0399] In some embodiments, a fusion protein disclosed herein comprising (a) a first cleavase and a guide RNA (gRNA) that targets at least one genomic locus and that is cognate to the first cleavase; and (b) a second cleavase and a gRNA that targets at least one genomic locus and that is cognate to the second cleavase, wherein the first cleavase is orthogonal to the second cleavase is provided. In some embodiments, the fusion protein disclosed herein comprises an R1333K SpyCas9 and a CjeCas9. In some embodiments, the fusion protein disclosed herein comprises an R1333K SpyCas9 and a SmuCas9. In some embodiments, the fusion protein disclosed herein comprises an R1333K Spy Cas9 and an Nme1Cas9. In some embodiments, the fusion protein disclosed herein comprises an R1333K Spy Cas9 and an Nme2Cas9. In some embodiments, the fusion protein disclosed herein comprises an R1333K Spy Cas9 and an Nme3Cas9.

[0400] In some embodiments, the first cleavase and the second cleavase are connected via a linker. In some embodiments, the first cleavase and the second cleavase are connected via a peptide linker. In some embodiments, the fusion protein disclosed herein further comprises one or more additional heterologous functional domains. In some embodiments, the first cleavase further comprises one or more nuclear localization sequences (NLSs) (described herein) at the C-terminal of the polypeptide or the N-terminal of the polypeptide. In some embodiments, the one or more NLS comprises one or more sequences selected from SEQ ID NOs: 366-384.

[0401] In some embodiments, a fusion protein disclosed herein comprising (a) a first cleavase and a guide RNA (gRNA) that targets at least one genomic locus and that is cognate to the first cleavase; and (b) a second cleavase and a gRNA that targets at least one genomic locus and that is cognate to the second cleavase, wherein the first cleavase is orthogonal to the second cleavase is provided. In some embodiments, the first cleavase comprises R1333K SpyCas9 and the second cleavase comprises Nme2 Cas9. In some embodiments, the R1333K SpyCas9 and the Nme2 Cas9 are fused via a linker. In some embodiments, the first cleavase comprises R1333K SpyCas9 and the second cleavase comprises Cje Cas9. In some embodiments, the R1333K SpyCas9 and the Cje Cas9 are fused via a linker. In some embodiments, the first cleavase comprises R1333K SpyCas9 and the second cleavase comprises Smu Cas9. In some embodiments, the R1333K SpyCas9 and the Smu Cas9 are fused via a linker. In some embodiments, the fusion protein disclosed herein comprises an NLS at the C-terminal of the polypeptide. In some embodiments, the fusion protein disclosed herein comprises a first NLS at the C-terminal of the polypeptide and a second NLS at the N-terminal of the polypeptide. In some embodiments, the fusion protein disclosed herein comprises a first and second NLS at the C-terminal of the polypeptide and a third NLS at the N-terminal of the polypeptide. In some embodiments, the fusion protein comprises a nuclear localization signal (NLS) and the NLS is present between the first or second Cas9 protein and the linker sequence. In some embodiments, the fusion protein comprises a nuclear localization signal (NLS) and the NLS is present within the linker sequence. In some embodiments, the fusion protein comprises a nuclear localization signal (NLS) and the NLS is present within the linker sequence. In some embodiments, the fusion protein comprises a nuclear localization signal (NLS) and the NLS is present between C-terminus of the first cleavase disclosed herein and the linker sequence. In some embodiments, the fusion protein comprises a nuclear localization signal (NLS) and the NLS is present between the C-terminus of the second cleavase disclosed herein and the linker sequence. In some embodiments, the fusion protein comprises a nuclear localization signal (NLS) and the NLS is present between N-terminus of the first cleavase disclosed herein and the linker sequence. In some embodiments, the fusion protein comprises a nuclear localization signal (NLS) and the NLS is present between N-terminus of the second cleavase disclosed herein and the linker sequence.

[0402] In some embodiments, the fusion protein disclosed herein comprises an amino acid sequence of SEQ ID NOs: 3, 5, 7, 10, 13, 16, 40, 43, 45, 47, 50, 52, 55, 57, 60, 62, 65, 67, 70, 72, 75, 77, 80, 82, 85, 87, 90, 92, 101, or 105, or an amino acid sequence that is at least 90%, or at least 95% identical to SEQ ID NO: 3, or an amino acid sequence that is at least 85%, at least 90%, or at least 95%% identical to an amino acid sequence of SEQ ID NOs: 5, 7, 10, 13, 16, 40, 43, 45, 47, 50, 52, 55, 57, 60, 62, 65, 67, 70, 72, 75, 77, 80, 82, 85, 87, 90, 92, 101, or 105.

[0403] In some embodiments, the nucleic acid encoding the fusion protein disclosed herein comprises a nucleotide sequence of SEQ ID NOs: 1, 2, 4, 6-8, 9, 11, 12, 14-15, 38-39, 41-42, 44, 46, 48-49, 51, 53, 54, 56, 58, 59, 61, 63, 64, 66, 68, 69, 71, 73, 74, 76, 78, 79, 81, 83, 84, 86, 88, 89, 91, 100, or 104, or a nucleotide sequence that is at least 90%, or at least 95% identical to SEQ ID NO: 1 or 2, or a nucleotide sequence that is at least 85%, at least 90%, or at least 95% identical to SEQ ID NO: 4, 6, 8, 9, 11, 12, 14-15, 38-39, 41-42, 44, 46, 48-49, 51, 53, 54, 56, 58, 59, 61, 63, 64, 66, 68, 69, 71, 73, 74, 76, 78, 79, 81, 83, 84, 86, 88, 89, 91, 100, or 104.

[0404] In some embodiments, the fusion protein disclosed herein comprises an amino acid sequence of SEQ ID NOs: 3, 5, 7, 10, or 13, or an amino acid sequence that is at least 90%, or at least 95% identical to SEQ ID NO: 3, or an amino acid sequence that is at least 85%, at least 90%, or at least 95%% identical to an amino acid sequence of SEQ ID NOs: 5, 7, 10, or 13.

[0405] In some embodiments, the nucleic acid encoding the fusion protein disclosed herein comprises a nucleotide sequence of SEQ ID NOs: 1, 2, 4, 6, 8, 9, 11 or 12, or a nucleotide sequence that is at least 90%, or at least 95% identical to SEQ ID NO: 1 or 2, or a nucleotide sequence that is at least 85%, at least 90%, or at least 95% identical to SEQ ID NO: 4, 6, 8, 9, 11 or 12.

[0406] In some embodiments, the fusion protein disclosed herein comprises an amino acid sequence of SEQ ID NOs: 5, 7, 10, or 13 or an amino acid sequence that is at least 85%, at least 90%, or at least 95%% identical to an amino acid sequence of SEQ ID NOs: 5, 7, 10, or 13.

[0407] or In some embodiments, the nucleic acid encoding the fusion protein disclosed herein comprises a nucleotide sequence of SEQ ID NOs: 4, 6, 8, 9, 11 or 12, a nucleotide sequence that is at least 85%, at least 90%, or at least 95% identical to SEQ ID NO: 4, 6, 8, 9, 11 or 12,

### III. Exemplary Composition and Methods for Genomic Editing

[0408] Compositions comprising the Cas9-Cas9 fusion protein or a nucleic acid (e.g., mRNA) encoding the fusion protein and the guide RNAs are provided. In some embodiments, the composition comprises (a) a polynucleotide comprising an open reading frame (ORF) encoding a fusion protein, wherein the fusion protein comprises a first cleavase and a second cleavase; (b) a first guide RNA that directs the first cleavase to a first genomic locus; and (c) a second guide RNA that directs the second cleavase to a second genomic locus, wherein the second genomic locus is different from the first genomic locus. In some embodiments, the first cleavase is a S. pyogenes (Spy)Cas9 cleavase comprising a R1333K mutation within its PAM recognition domain. In some embodiments, the second cleavase is a N. meningitidis (Nme)Cas9 cleavase (e.g., an Nme1Cas9, an Nme2Cas9, or an Nme3 Cas9), a C. jejuni (Cje) Cas9 cleavase, or a Simonsiella muelleri (Smu) Cas9. The compositions disclosed herein may be used for producing a modification in the genome of a target cell.

[0409] Methods of producing a modification in the genome of a target cell are provided. In some embodiments, provided herein is a method comprising contacting the cell with an orthogonal Cas9-Cas9 fusion protein comprising a first cleavase and a second cleavase, or a nucleic acid encoding the fusion protein, thereby excising a DNA sequence between a first cleavage site cleaved by the first Cas9 cleavase and a second cleavage site cleaved by the second Cas9 cleavase. In some embodiments, the method comprises contacting the cell with: (a) a fusion protein, or a nucleic acid encoding a fusion protein, wherein the fusion protein comprises a first cleavase and a second cleavase; and (b) a first guide RNA that directs the first cleavase to a first genomic locus; and (c) a second guide RNA that directs the second cleavase to a second genomic locus, wherein the second genomic locus is different from the first genomic locus.

[0410] Method of producing an edited (or engineered) cell or a population of engineered cells are also contemplated. In some embodiments, the method comprises a modification in the genome of the target cell or cells, the method comprising contacting the cell or cells with: (a) a fusion protein, or a nucleic acid encoding a fusion protein, wherein the fusion protein comprises a first cleavase and a second cleavase; and (b) a first guide RNA that directs the first cleavase to a first genomic locus; and (c) a second guide RNA that directs the second cleavase to a second genomic locus, wherein the second genomic locus is different from the first genomic locus.

[0411] In some embodiments, the first guide RNA and the second guide RNA target two non-overlapping genomic loci. In some embodiments, the two non-overlapping genomic loci are separated by equal to or less than 500, 450, 400, 350, 300, 250, 200, 150, 140, 130, 120, 110, 100, 90, 80, 70, 60, 50, 40, 30, or 25 nucleotides. In some embodiments, the two non-overlapping genomic loci are separated by equal to or less than 150, 140, 130, 120, 110, 100, 90, 80, 70, 60, 50, 40, 30, or 25 nucleotides. In some embodiments, the two non-overlapping genomic loci are separated by 25-150, 30-150, 40-150, 50-150, 60-150, 70-150, 80-150, 90-150, 100-150, 110-150, 120-150, 130-150, or 140-150 nucleotides. In some embodiments, the two non-overlapping genomic loci are separated by 25-110, 30-110, 40-110, 50-110, 60-110, 70-110, 80-110, 90-110, or 100-110 nucleotides. In some embodiments, the two non-overlapping genomic loci are separated by 25-90, 30-90, 40-90, 50-90, 60-90, 70-90, or 80-90 nucleotides. In some embodiments, the two non-overlapping genomic loci are separated by equal to or less than 110 nucleotides. In some embodiments, the first guide RNA is a single guide RNA (sgRNA). In some embodiments, the first guide RNA is a SpyCas9 guide RNA. In some embodiments, the second guide RNA is a NmeCas9 guide RNA. In some embodiments, one or both of the guide RNAs comprises one or more mismatches to the target sequences.

[0412] In some embodiments, the nucleic acid encoding the fusion protein are delivered to the cell on at least one vector. In some embodiments, the fusion protein or the nucleic acid encoding the fusion protein are delivered to the cell via electroporation. In some embodiments, the first guide RNA is delivered to the cell via electroporation. In some embodiments, the second guide RNA is delivered to the cell via electroporation.

[0413] In some embodiments, one or more of the nucleic acids encoding the fusion protein, the first guide RNA, and the second guide RNA are associated with one or more lipid nanoparticle (LNP). In some embodiments, the nucleic acids each encoding the fusion protein, the first guide RNA, and the second guide RNA are each associated with a separate lipid nanoparticle (LNP). In some embodiments, the first guide RNA and the second guide RNA are associated with a same lipid nanoparticle (LNP). In some embodiments, all of the nucleic acid encoding the fusion protein, the first guide RNA, and the second guide RNA are associated with a same lipid nanoparticle (LNP). Delivery of the polynucleotides and compositions via LNPs are further described below.

[0414] In some embodiments, the modification is in vivo. In some embodiments, the modification is ex vivo.

[0415] In some embodiments, the modification comprises a deletion of equal to or less than 500, 450, 400, 350, 300, 250, 200, 150, 140, 130, 120, 110, 100, 90, 80, 70, 60, 50,40,30 nucleotides. In some embodiments, the modification comprises a deletion of equal to or less than 150, 140, 130, 120, 110, 100, 90, 80, 70, 60, 50, 40, 30 nucleotides. In some embodiments, the modification comprises a deletion of 25-150, 30-150, 40-150, 50-150, 60-150, 70-150, 80-150, 90-150, 100-150, 110-150, 120-150, 130-150, or 140-150 nucleotides. In some embodiments, the modification comprises a deletion of 25-110, 30-110, 40-110, 50-110, 60-110, 70-110, 80-110, 90-110, or 100-110 nucleotides. In some embodiments, the modification comprises a deletion of 25-90, 30-90, 40-90, 50-90, 60-90, 70-90, or 80-90 nucleotides.

[0416] In some embodiments, the modification comprises a deletion of equal to or less than 500, 450, 400, 350, 300, 250, 200, 150, 140, 130, 120, 110, 100, 90, 80, 70, 60, 50, 40, 30, or 25 contiguous nucleotides. In some embodiments, the modification comprises a deletion of equal to or less than 500-450, 500-400, 500-350, 500-300, 500-250, 500-200, 500-150, 500-140, 500-130, 500-120, 500-110, 500-100, 500-90, 500-80, 500-70, 500-60, 500-50, 500-40, or 500-30 contiguous nucleotides. In some embodiments, the modification comprises a deletion of equal to or less than 150, 140, 130, 120, 110, 100, 90, 80, 70, 60, 50, 40, 30, or 25 contiguous nucleotides.

[0417] In some embodiments, the modification comprises a deletion of 25-150, 30-150, 40-150, 50-150, 60-150, 70-150, 80-150, 90-150, 100-150, 110-150, 120-150, 130-150, or 140-150 contiguous nucleotides. In some embodiments, the modification comprises a deletion of 25-110, 30-110, 40-110, 50-110, 60-110, 70-110, 80-110, 90-110, or 100-110 contiguous nucleotides. In some embodiments, the modification comprises a deletion of 25-90, 30-90, 40-90, 50-90, 60-90, 70-90, or 80-90 contiguous nucleotides.

[0418] In some embodiments, the modification comprises a deletion of equal to or larger than 25, 35, 45, 55, 65, 75, 85, 95, 100, 105, 115, 124, 135, 145, 155, 205, 255, 305, 355, 405, or 455 nucleotides. In some embodiments, the modification comprises a deletion of equal to or larger than about 25, about 35, about 45, about 55, about 65, about 75, about 85, about 95, about 100, or about 105 nucleotides. In some embodiments, the modification comprises a deletion of equal to or larger than 25, 35, 45, 55, 65, 75, 85, 95, 100, 105, 115, 124, 135, 145, 155, 205, 255, 305, 355, 405, or 455 contiguous nucleotides. In some embodiments, the modification comprises a deletion of equal to or larger than about 25, about 35, about 45, about 55, about 65, about 75, about 85, about 95, about 100, or about 105 contiguous nucleotides.

[0419] In some embodiments, the modification comprises a deletion of each of the nucleotides between a first cleavage site and a second cleavage site. In some embodiments, the deletion comprises one or both protospacer adjacent motif (PAM) sites recognized by the first cleavase or the second cleavase.

[0420] In some embodiments, the modification reduces or eliminates the expression of one or more mRNAs or proteins.

[0421] In some embodiments, the modification reduces or eliminates the expression of one or more mRNAs by at least 50%, at least 55%, at least 60%, at least 65%, at least 70%, at least 75%, at least 80%, at least 85%, at least 90%, or at least 95%. In some embodiments, the modification reduces or eliminates the expression of one or more proteins by at least 50%, at least 55%, at least 60%, at least 65%, at least 70%, at least 75%, at least 80%, at least 85%, at least 90%, or at least 95%.

[0422] In some embodiments, the modification increases the expression of one or more RNAs or proteins. In some embodiments, the modification increases the expression of one or more mRNAs by at least two-fold, at least three-fold, or at least four-fold or at least five-fold. In some embodiments, the modification increases the expression of one or more proteins by at least two-fold, at least three-fold, or at least four-fold or at least five-fold.

[0423] In some embodiments, the expression of one or more target protein is reduced or eliminated in a population of cells using the methods and compositions disclosed herein. In some embodiments, the population of cells is at least 55%, 60%, 65%, 70%, 80%, 90%, 91%, 92%, 93%, 94%, 95%, 96%, 97%, 98%, or 99% negative for a target protein as measured by flow cytometry relative to a population of unmodified cells.

[0424] In some embodiments, the expression of one or more target protein is increased in a population of cells using the methods and compositions disclosed herein. In some embodiments, the population of cells is at least 55%, 60%, 65%, 70%, 80%, 90%, 91%, 92%, 93%, 94%, 95%, 96%, 97%, 98%, or 99% positive for a target protein as measured by flow cytometry relative to a population of unmodified cells.

[0425] In some embodiments, the modification results in the deletion of a start codon. In some embodiments, the modification results in the deletion of a splice site. In some embodiments, the modification results in the deletion of a splicing enhancer. In some embodiments, the modification results in the deletion of a splicing repressor. In some embodiments, the modification results in the deletion of a transcription factor binding site.

### A. Fusion Protein Via Intein

[0426] In some embodiments, the composition disclosed herein include (a) a first polynucleotide comprising an ORF encoding the first polypeptide, wherein the first polypeptide comprises first cleavase and a first intein and (b) a second polynucleotide comprising an ORF encoding the second polypeptide, wherein the first polypeptide binds to the second polypeptide through intein catalysis.

[0427] In some embodiments, a method of producing a modification in the genome of a target cell is provided. The method comprises (a) contacting the cell with a first polypeptide, or a nucleic acid encoding the first polypeptide; (b) contacting the cell with a second polypeptide, or a nucleic acid encoding the first polypeptide, wherein the second polypeptide comprises a second cleavase and a second intein capable of binding the first intein; and wherein the first polypeptide binds to the second polypeptide through intein catalysis, (b) contacting the cell with a first guide RNA that directs the first cleavase to a first genomic locus; and (c) contacting the cell with a second guide RNA that directs the second cleavase to a second genomic locus, wherein the second genomic locus is different from the first genomic locus.

[0428] In some embodiments, the first polypeptide comprises, from N-terminus to C-terminus: the first intein; the first cleavase is a S. pyogenes (Spy)Cas9 cleavase, said SpyCas9 cleavase comprising a R1333K mutation within its protospacer adjacent motif recognition domain; and a first NLS comprising an SV40 NLS.

[0429] In some embodiments, the second polypeptide comprises, from N-terminus to C-terminus: a second NLS comprising an SV40 NLS; a third NLS comprising a nucleoplasmin NLS; the second cleavase; a peptide linker, optionally wherein the peptide linker comprises 41 or 81 amino acid residues; and the second intein capable of binding the first intein.

[0430] In some embodiments, the first polypeptide comprises an amino acid sequence of SEQ ID NOs: 28 or 31 or an amino acid sequence that is at least 85%, at least 90%, or at least 95% identical to SEQ ID NO: 28 or 31.

[0431] In some embodiments, the nucleic acid or nucleic acids encoding the first polypeptide or polypeptides comprises a sequence of SEQ ID NOs: 27 or 30, or a nucleotide sequence that is at least 85%, at least 90%, or at least 95% identical to SEQ ID NOs: 27 or 30.

[0432] In some embodiments, the second polypeptide comprises an amino acid sequence of SEQ ID NOs: 25 or 34 or an amino acid sequence that is at least 85%, at least 90%, or at least 95% identical to SEQ ID NO: 25 or 34. In some embodiments, the nucleic acid or nucleic acids encoding the polypeptide or polypeptides comprises a sequence of SEQ ID NOs: 24 or 33, or a nucleotide sequence that is at least 85%, at least 90%, or at least 95% identical to SEQ ID NOs: 24 or 33.

### IV. Additional Features

[0433] The following section provides additional features of the Cas9 cleavases, fusion protein, the nucleic acid or nucleic acids encoding the same, guide RNAs, and compositions disclosed herein. In any of the embodiments set forth herein, the nucleic acid or nucleic acids may be one or more expressions construct comprising a promoter operably linked to an ORF encoding Cas9 cleavase or more polypeptides comprising the fusion protein disclosed herein.

### A. Codon-Optimization

[0434] In some embodiments, the nucleic acid or nucleic acids encoding polypeptide or polypeptides comprising the first cleavase, second cleavase or fusion protein disclosed herein comprises one or more ORFs comprising one or more codon optimized nucleic acid sequences. In some embodiment, the codon optimized nucleic acid sequence or sequences comprise minimal adenine codons and/or minimal uridine codons.

[0435] A given ORF can be reduced in adenine content or adenine dinucleotide content, for example, by using minimal adenine codons in a sufficient fraction of the ORF. For example, one or more amino acid sequence for the first cleavase, second cleavase or fusion protein disclosed herein described herein can be back-translated into one or more ORF sequences by converting amino acids to codons, wherein some or all of the ORF or ORFs uses the exemplary minimal adenine codons shown below. In some embodiments, at least about 50%, at least about 55%, at least about 60%, at least about 65%, at least about 70%, at least about 75%, at least about 80%, at least about 85%, at least about 90%, at least about 95%, at least about 98%, at least about 99%, or 100% of the codons in the ORF are codons listed in Table 1A.

TABLE 1A
Exemplary minimal adenine codons

| | Amino Acid | Minimal adenine codon |
|---|---|---|
| A | Alanine | GCU or GCC or GCG |
| G | Glycine | GGU or GGC or GGG |
| V | Valine | GUC or GUU or GUG |
| D | Aspartic acid | GAC or GAU |
| E | Glutamic acid | GAG |
| I | Isoleucine | AUC or AUU |
| T | Threonine | ACU or ACC or ACG |
| N | Asparagine | AAC or AAU |
| K | Lysine | AAG |
| S | Serine | UCU or UCC or UCG |
| R | Arginine | CGU or CGC or CGG |
| L | Leucine | CUG or CUC or CUU |
| P | Proline | CCG or CCU or CCC |
| H | Histidine | CAC or CAU |
| Q | Glutamine | CAG |
| F | Phenylalanine | UUC or UUU |
| Y | Tyrosine | UAC or UAU |
| C | Cysteine | UGC or UGU |
| W | Tryptophan | UGG |
| M | Methionine | AUG |

[0436] In some embodiments, the ORF or ORFs may consist of a set of codons of which at least about 75%, at least about 80%, at least about 85%, at least about 90%, at least about 95%, at least about 98%, at least about 99%, or 100% of the codons are codons listed in Table 2.

[0437] To the extent feasible, any of the features described above with respect to low adenine content can be combined with any of the features described above with respect to low uridine content. So too for uridine and adenine dinucleotides. Similarly, the content of uridine nucleotides and adenine dinucleotides in the ORF or ORFs may be as set forth above. Similarly, the content of uridine dinucleotides and adenine nucleotides in the ORF or ORFs may be as set forth above.

[0438] In some instances, a given ORF can be reduced in uridine content or uridine dinucleotide content, for example, by using minimal uridine codons in a sufficient fraction of the ORF. In other instances, a given ORF can be reduced in uridine and adenine nucleotide or dinucleotide content, for example, by using minimal uridine and adenine codons in a sufficient fraction of the ORF. For example, one or more amino acid sequence for the first cleavase, second cleavase or fusion protein disclosed herein can be back-translated into an ORF sequence by converting amino acids to codons, wherein some or all of the ORF or ORFs uses the minimal uridine codons or minimal uridine and adenine codons. Exemplary the exemplary minimal uridine codons or exemplary minimal uridine and adenine codons may be found in WO

[0439] In some embodiments, the ORF may have codons that increase translation in a mammal, such as a human. In further embodiments, ORF is an mRNA and comprises codons that increase translation in an organ, such as the liver, of the mammal, e.g., a human. In further embodiments, the ORF may have codons that increase translation in a cell type, such as a hepatocyte, of the mammal, e.g., a human. An increase in translation in a mammal, cell type, organ of a mammal, human, organ of a human, etc., can be determined relative to the extent of translation wild-type sequence of the ORF, or relative to an ORF having a codon distribution matching the codon distribution of the organism from which the ORF was derived or the organism that contains the most similar ORF at the amino acid level. In some embodiments, at least about 75%, at least about 80%, at least about 85%, at least about 90%, at least about 95%, at least about 96%, at least about 97%, at least about 98%, at least about 99%, or 100% of the codons in an ORF are codons corresponding to highly expressed tRNAs (e.g., the highest-expressed tRNA for each amino acid) in a mammal, such as a human. In some embodiments, at least 75%, at least 80%, at least 85%, at least 90%, at least 95%, at least 96%, at least 97%, at least 98%, at least 99%, or 100% of the codons in an ORF are codons corresponding to highly expressed tRNAs (e.g., the highest-expressed tRNA for each amino acid) in a mammalian organ, such as a human organ. Alternatively, codons corresponding to highly expressed tRNAs in an organism (e.g., human) in general may be used.

[0440] Any of the foregoing approaches to codon selection can be combined with the minimal uridine or adenine codons e.g., by starting with the codons of Table 1 and then where more than one option is available, using the codon that corresponds to a more highly-expressed tRNA, either in the organism (e.g., human) in general, or in an organ or cell type of interest (e.g., human liver or human hepatocytes).

[0441] In some embodiments, at least 75%, at least 80%, at least 85%, at least 90%, at least 95%, at least 96%, at least 97%, at least 98%, at least 99%, or 100% of the codons in an ORF are codons from a codon set shown in Table 1B (e.g., the low U 1, low A, or low A/U codon set). The codons in the low U 1, low G, low A, and low A/U sets use codons that minimize the indicated nucleotides while also using codons corresponding to highly expressed tRNAs where more than one option is available. In some embodiments, at least 75%, at least 80%, at least 85%, at least 90%, at least 95%, at least 96%, at least 97%, at least 98%, at least 99%, or 100% of the codons in an ORF are codons from the low U 1 codon set shown in Table 1B. In some embodiments, at least 75%, at least 80%, at least 85%, at least 90%, at least 95%, at least 96%, at least 97%, at least 98%, at least 99%, or 100% of the codons in an ORF are codons from the low A codon set shown in Table 1B. In some embodiments, at least 75%, at least 80%, at least 85%, at least 90%, at least 95%, at least 96%, at least 97%, at least 98%, at least 99%, or 100% of the codons in an ORF are codons from the low A/U codon set shown in Table 1B.

TABLE 1B
Exemplary Codon Sets.

| Amino Acid | Low U 1 | Low U 2 | Low A | Low A/U |
|---|---|---|---|---|
| Gly | GGC | GGG | GGC | GGC |
| Glu | GAG | GAA | GAG | GAG |
| Asp | GAC | GAC | GAC | GAC |
| Val | GTG | GTA | GTG | GTG |
| Ala | GCC | GCG | GCC | GCC |
| Arg | AGA | CGA | CGG | CGG |
| Ser | AGC | AGC | TCC | AGC |
| Lys | AAG | AAA | AAG | AAG |
| Asn | AAC | AAC | AAC | AAC |
| Met | ATG | ATG | ATG | ATG |
| Ile | ATC | ATA | ATC | ATC |
| Thr | ACC | ACG | ACC | ACC |
| Trp | TGG | TGG | TGG | TGG |
| Cys | TGC | TGC | TGC | TGC |
| Tyr | TAC | TAC | TAC | TAC |
| Leu | CTG | CTA | CTG | CTG |
| Phe | TTC | TTC | TTC | TTC |
| Gln | CAG | CAA | CAG | CAG |
| His | CAC | CAC | CAC | CAC |

### B. Heterologous Functional Domains

[0442] In some embodiments, the heterologous functional domain may be capable of modifying the intracellular half-life of the fusion protein disclosed herein. In some embodiments, the half-life of the fusion protein disclosed herein may be increased. In some embodiments, the half-life of the fusion protein disclosed herein may be reduced. In some embodiments, the heterologous functional domain may be capable of increasing the stability of the fusion protein disclosed herein. In some embodiments, the heterologous functional domain may be capable of reducing the stability of the fusion protein disclosed herein. In some embodiments, the heterologous functional domain may act as a signal peptide for protein degradation. In some embodiments, the protein degradation may be mediated by proteolytic enzymes, such as, for example, proteasomes, lysosomal proteases, or calpain proteases. In some embodiments, the heterologous functional domain may comprise a PEST sequence. In some embodiments, the polypeptide may be modified by addition of ubiquitin or a polyubiquitin chain. In some embodiments, the ubiquitin may be a ubiquitin-like protein (UBL). Non-limiting examples of ubiquitin-like proteins include small ubiquitin-like modifier (SUMO), ubiquitin cross-reactive protein (UCRP, also known as interferon-stimulated gene-15 (ISG15)), ubiquitin-related modifier-1 (URM1), neuronal-precursor-cell-expressed developmentally downregulated protein-8 (NEDD8, also called Rub1 in S. cerevisiae), human leukocyte antigen F-associated (FAT10), autophagy-8 (ATG8) and -12 (ATG12), Fau ubiquitin-like protein (FUB1), membrane-anchored UBL (MUB), ubiquitin fold-modifier-1 (UFM1), and ubiquitin-like protein-5 (UBL5).

[0443] In some embodiments, the heterologous functional domain may be a marker domain. Non-limiting examples of marker domains include fluorescent proteins, purification tags, epitope tags, and reporter gene sequences. In some embodiments, the marker domain may be a fluorescent protein. Any known fluorescent proteins may be used as the marker domain such as GFP, YFP, EBFP, ECFP, DsRed or any other suitable fluorescent protein. In some embodiments, the marker domain may be a purification tag or an epitope tag. Non-limiting exemplary tags include glutathione-S-transferase (GST), chitin binding protein (CBP), maltose binding protein (MBP), thioredoxin (TRX), poly(NANP), tandem affinity purification (TAP) tag, myc, AcV5, AU1, AU5, E, ECS, E2, FLAG, HA, nus, Softag 1, Softag 3, Strep, SBP, Glu-Glu, HSV, KT3, S, S1, T7, V5, VSV-G, 6×His, 8×His, biotin carboxyl carrier protein (BCCP), poly-His, and calmodulin. In some embodiments, the marker domain may be a reporter gene. Non-limiting exemplary reporter genes include glutathione-S-transferase (GST), horseradish peroxidase (HRP), chloramphenicol acetyltransferase (CAT), beta-galactosidase, beta-glucuronidase, luciferase, or fluorescent proteins.

[0444] In additional embodiments, the heterologous functional domain may target the fusion protein disclosed herein to a specific organelle, cell type, tissue, or organ. In some embodiments, the heterologous functional domain may target the fusion protein disclosed herein to mitochondria.

### C. UTRs; Kozak Sequences

[0445] In some embodiments, the nucleic acid (e.g., mRNA) disclosed herein comprises a 5′ UTR, 3′ UTR, or 5′ and 3′ UTRs from Hydroxysteroid 17-Beta Dehydrogenase 4 (HSD17B4 or HSD) or globin such as human alpha globin (HBA), human beta globin (HBB), Xenopus laevis beta globin (XBG), bovine growth hormone, cytomegalovirus (CMV), mouse Hba-al, heat shock protein 90 (Hsp90), glyceraldehyde 3-phosphate dehydrogenase (GAPDH), beta-actin, alpha-tubulin, tumor protein (p53), or epidermal growth factor receptor (EGFR).

[0446] In some embodiments, the nucleic acid described herein does not comprise a 5′ UTR, e.g., there are no additional nucleotides between the 5′ cap and the start codon. In some embodiments, the nucleic acid comprises a Kozak sequence (described below) between the 5′ cap and the start codon, but does not have any additional 5′ UTR. In some embodiments, the nucleic acid does not comprise a 3′ UTR, e.g., there are no additional nucleotides between the stop codon and the poly-A tail.

[0447] In some embodiments, the polynucleotide comprises a 5′ UTR with at least 85%, at least 90%, or at least 95% identity to any one of SEQ ID NOs: 398-405. In some embodiments, the polynucleotide comprises a 3′ UTR with at least 85%, at least 90%, or at least 95% identity to any one of SEQ ID NOs: 406-413. In some embodiments, the polynucleotide comprises a 5′ UTR and 3′ UTR from the same source.

[0448] In some embodiments, the nucleic acid herein comprises a Kozak sequence. The Kozak sequence can affect translation initiation and the overall yield of a polypeptide translated from an mRNA. A Kozak sequence includes a methionine codon that can function as the start codon. A minimal Kozak sequence is NNNRUGN (SEQ ID NO: 417) wherein at least one of the following is true: the first N is A or G and the second N is G. In the context of a nucleotide sequence, R means a purine (A or G). In some embodiments, the Kozak sequence is RNNRUGN (SEQ ID NO: 418), NNNRUGG (SEQ ID NO: 419), RNNRUGG (SEQ ID NO: 420), RNNAUGN (SEQ ID NO: 421), NNNAUGG (SEQ ID NO: 422), RNNAUGG (SEQ ID NO: 423), or GCCACCAUG (SEQ ID NO: 424).

### D. Poly-A Tail

[0449] In some embodiments, the nucleic acid disclosed herein further comprises a polyadenylated (poly-A) tail. The poly-A tails may comprise at least 8 consecutive adenine nucleotides, but also comprise one or more non-adenine nucleotide. As used herein, “non-adenine nucleotides” refers to any natural or non-natural nucleotides that do not comprise adenine. Guanine, thymine, and cytosine nucleotides are exemplary non-adenine nucleotides. Thus, the poly-A tails on the nucleic acid described herein may comprise consecutive adenine nucleotides located 3′ to nucleotides encoding a polypeptide of interest. In some instances, the poly-A tails on the nucleic acid comprise non-consecutive adenine nucleotides located 3′ to nucleotides encoding the polypeptide, wherein non-adenine nucleotides interrupt the adenine nucleotides at regular or irregularly spaced intervals.

[0450] In some embodiments, the poly-A tail is encoded in a plasmid used for in vitro transcription of an mRNA and becomes part of the transcript. The poly-A sequence encoded in the plasmid, i.e., the number of consecutive adenine nucleotides in the poly-A sequence, may not be exact, e.g., a 100 poly-A sequence in the plasmid may not result in a precisely 100 poly-A sequence in the transcribed mRNA. In some embodiments, the poly-A tail is not encoded in the plasmid, and is added by PCR tailing or enzymatic tailing, e.g., using E. coli poly(A) polymerase.

[0451] In some embodiments, the one or more non-adenine nucleotides are positioned to interrupt the consecutive adenine nucleotides so that a poly(A) binding protein can bind to a stretch of consecutive adenine nucleotides. In some embodiments, one or more non-adenine nucleotide(s) is located after at least 8, at least 9, at least 10, at least 11, or at least 12 consecutive adenine nucleotides. In some embodiments, the one or more non-adenine nucleotide is located after 8-50 consecutive adenine nucleotides. In some embodiments, the one or more non-adenine nucleotide is located after 8-100 consecutive adenine nucleotides.

[0452] In some embodiments, the poly-A tail comprises or contains one non-adenine nucleotide or one consecutive stretch of 2-10 non-adenine nucleotides.

[0453] In some embodiments, the non-adenine nucleotide is guanine, cytosine, or thymine. In some instances, where more than one non-adenine nucleotide is present, the non-adenine nucleotide may be selected from: a) guanine and thymine nucleotides; b) guanine and cytosine nucleotides; c) thymine and cytosine nucleotides; or d) guanine, thymine and cytosine nucleotides.

### E. Modified Nucleotides

[0454] In some embodiments, the nucleic acid disclosed herein comprises a modified uridine at some or all uridine positions. In some embodiments, the modified uridine is a uridine modified at the 5 position, e.g., with a halogen or C1-C3 alkoxy. In some embodiments, the modified uridine is a pseudouridine modified at the 1 position, e.g., with a C1-C3 alkyl. The modified uridine can be, for example, pseudouridine, N1-methyl-pseudouridine, 5-methoxyuridine, 5-iodouridine, or a combination thereof.

[0455] In some embodiments, at least 10%, at least 15%, at least 20%, at least 25%, at least 30%, at least 35%, at least 40%, at least 45%, at least 50%, at least 55%, at least 60%, at least 65%, at least 70%, at least 75%, at least 80%, at least 85%, at least 90%, at least 95%, at least 98%, at least 99%, or 100% of the uridine positions in the nucleic acid disclosed herein are modified uridines. In some embodiments, 10%-25%, 15-25%, 25-35%, 35-45%, 45-55%, 55-65%, 65-75%, 75-85%, 85-95%, or 90-100% of the uridine positions in an mRNA disclosed herein are modified uridines, e.g., 5-methoxyuridine, 5-iodouridine, N1-methyl pseudouridine, pseudouridine, or a combination thereof. In some embodiments, 80-95% or 80-100% of the uridine positions in an mRNA disclosed herein are modified uridines, e.g., 5-methoxyuridine, 5-iodouridine, N1-methyl pseudouridine, pseudouridine, or a combination thereof.

[0456] In some embodiments, at least 10% of the uridine is substituted with a modified uridine. In some embodiments, 15% to 45% of the uridine is substituted with the modified uridine. In some embodiments, at least 20%, at least 30%, at least 40%, at least 50%, at least 60%, at least 70%, at least 80%, at least 90%, or 100% of the uridine is substituted with the modified uridine.

[0457] In some embodiments, at least 85% of the uridine is substituted with modified uridine.

[0458] In some embodiments, the modified uridine is one or more of N1-methyl-pseudouridine, pseudouridine or 5-iodouridine. In some embodiments, the modified uridine is N1-methyl-pseudouridine. In some embodiments, the modified uridine is pseudouridine. In some embodiments, the modified uridine is 5-iodouridine. In some embodiments, at least 85% of the uridine is substituted with the modified uridine. In some embodiments, 100% uridine is substituted with the modified uridine.

### F. 5′ Cap

[0459] In some embodiments, the nucleic acid disclosed herein comprises a 5′ cap, such as a Cap0, Cap1, or Cap2. A 5′ cap is generally a 7-methylguanine ribonucleotide (which may be further modified, as discussed below e.g., with respect to ARCA) linked through a 5′-triphosphate to the 5′ position of the first nucleotide of the 5′-to-3′ chain of the nucleic acid, i.e., the first cap-proximal nucleotide. In Cap0, the riboses of the first and second cap-proximal nucleotides of the mRNA both comprise a 2′-hydroxyl. In Cap1, the riboses of the first and second transcribed nucleotides of the nucleic acid comprise a 2′-methoxy and a 2′-hydroxyl, respectively. In Cap2, the riboses of the first and second cap-proximal nucleotides of the nucleic acid both comprise a 2′-methoxy. See, e.g., Katibah et al. (2014) Proc Natl Acad Sci USA 111(33):12025-30; Abbas et al. (2017) Proc Natl Acad Sci USA 114(11):E2106-E2115. Most endogenous higher eukaryotic nucleic acids, including mammalian nucleic acids such as human nucleic acids, comprise Cap1 or Cap2. Cap0 and other cap structures differing from Cap1 and Cap2 may be immunogenic in mammals, such as humans, due to recognition as “non-self” by components of the innate immune system such as IFIT-1 and IFIT-5, which can result in elevated cytokine levels including type I interferon. Components of the innate immune system such as IFIT-1 and IFIT-5 may also compete with eIF4E for binding of a nucleic acids with a cap other than Cap1 or Cap2, potentially inhibiting translation of the nucleic acid.

[0460] A cap can be included co-transcriptionally. For example, ARCA (anti-reverse cap analog; Thermo Fisher Scientific Cat. No. AM8045) is a cap analog comprising a 7-methylguanine 3′-methoxy-5′-triphosphate linked to the 5′ position of a guanine ribonucleotide which can be incorporated in vitro into a transcript at initiation. ARCA results in a Cap0 cap or a Cap0-like cap in which the 2′ position of the first cap-proximal nucleotide is hydroxyl. See, e.g., Stepinski et al., (2001) “Synthesis and properties of mRNAs containing the novel ‘anti-reverse’ cap analogs 7-methyl(3′-O-methyl)GpppG and 7-methyl(3′deoxy)GpppG,” RNA 7: 1486-1495. The ARCA structure is shown below.

[chemical structure]

[0461] CleanCap™ AG (m7G(5′)ppp(5′)(2′OMeA)pG; TriLink Biotechnologies Cat. No. N-7113) or CleanCap™ GG (m7G(5′)ppp(5′)(2′OMeG)pG; TriLink Biotechnologies Cat. No. N-7133) can be used to provide a Cap1 structure co-transcriptionally. 3′-O-methylated versions of CleanCap™ AG and CleanCap™ GG are also available from TriLink Biotechnologies as Cat. Nos. N-7413 and N-7433, respectively. The CleanCap™ AG structure is shown below. CleanCap™ structures are sometimes referred to herein using the last three digits of the catalog numbers listed above (e.g., “CleanCap™ 113” for TriLink Biotechnologies Cat. No. N-7113).

[chemical structure]

[0462] Alternatively a cap can be added to an RNA post-transcriptionally. For example, Vaccinia capping enzyme is commercially available (New England Biolabs Cat. No. M2080S) and has RNA triphosphatase and guanylyltransferase activities, provided by its D subunit, and guanine methyltransferase, provided by its D12 subunit. As such, it can add a 7-methylguanine to an RNA, so as to give Cap0, in the presence of g-adenosyl methionine and GTP. See, e.g., Guo, P. and Moss, B. (1990) Proc. Natl. Acad. Sci. USA 87, 4023-4027; Mao, X. and Shuman, S. (1994) J. Biol. Chem. 269, 24472-24479. For additional discussion of caps and capping approaches, see, e.g., WO2017/053297 and Ishikawa et al., Nucl. Acids. Symp. Ser. (2009) No. 53, 129-130.

### V. Guide RNAs

[0463] In some embodiments, the fusion protein disclosed herein comprises (a) a first cleavase and a guide RNA (gRNA) that targets a first genomic locus and that is cognate to the first cleavase; and (b) a second cleavase and a gRNA that targets a second genomic locus and that is cognate to the second cleavase, wherein the first genomic locus is different from the second genomic locus.

[0464] In some embodiments, the first gRNA that is cognate to the first cleavase is non-cognate to the second cleavase. In some embodiments, the second gRNA that is cognate to the second cleavase is non-cognate to the first cleavase.

### A. Target Sequences and Genes

[0465] In some embodiments, the methods and compositions of the present disclosure utilize an orthogonal Cas9-Cas9 fusion system directed by guide RNAs to excise a sequence between a first cleavage site cleaved by the first Cas9 cleavase and a second cleavage site cleaved by the second Cas9 cleavase.

[0466] For example, a target sequence may be recognized and cleaved by a Cas nuclease. In some embodiments, a target sequence for a Cas nuclease is located near the nuclease's cognate PAM sequence. In some embodiments, a Class 2 Cas nuclease may be directed by a gRNA to a target sequence of a gene, where the gRNA hybridizes with and the Class 2 Cas protein cleaves the target sequence. In some embodiments, the guide RNA hybridizes with and a Class 2 Cas nuclease cleaves the target sequence adjacent to or comprising its cognate PAM. In some embodiments, the target sequence may be complementary to a targeting sequence of the guide RNA. In some embodiments, the degree of complementarity between a targeting sequence of a guide RNA and the portion of the corresponding target sequence that hybridizes to the guide RNA may be about 80%, about 85%, about 90%, about 95%, about 97%, about 98%, about 99%, or 100%. In some embodiments, the percent identity between a targeting sequence of a guide RNA and the portion of the corresponding target sequence that hybridizes to the guide RNA may be about 80%, about 85%, about 90%, about 95%, about 97%, about 98%, about 99%, or 100%. In some embodiments, the homology region of the target is adjacent to a cognate PAM sequence. In some embodiments, the target sequence may comprise a sequence 100% complementary with the targeting sequence of the guide RNA. In other embodiments, the target sequence may comprise at least one mismatch, deletion, or insertion, as compared to the targeting sequence of the guide RNA.

[0467] The length of the target sequence may depend on the nuclease system used. For example, the targeting sequence of a guide RNA for a CRISPR/Cas system may comprise 10, 11, 12, 13, 14, 15, 16, 17, 18, 19, 20, 21, 22, 23, 24, 25, 26, 27, 28, 29, or 30 in length and the target sequence is a corresponding length, optionally adjacent to a PAM sequence. In some embodiments, the target sequence may comprise 15-24 nucleotides in length. In some embodiments, the target sequence may comprise 17-21 nucleotides in length. In some embodiments, the target sequence may comprise 20 nucleotides in length. In some embodiments, the target sequence may comprise 24 nucleotides in length. In some embodiments, the target sequence may comprise a part of target sequences recognized by one or more Cas nucleases.

[0468] The target nucleic acid molecule may be any DNA or RNA molecule that is endogenous or exogenous to a cell. In some embodiments, the target nucleic acid molecule may be an episomal DNA, a plasmid, a genomic DNA, viral genome, or chromosomal DNA. In some embodiments, the target sequence of the gene may be a genomic sequence from a cell or in a cell, including a human cell.

[0469] In further embodiments, the target sequence may be a viral sequence. In further embodiments, the target sequence may be a pathogen sequence. In yet other embodiments, the target sequence may be a synthesized sequence. In further embodiments, the target sequence may be a chromosomal sequence. In certain embodiments, the target sequence may comprise a translocation junction, e.g., a translocation associated with a cancer. In some embodiments, the target sequence may be on a eukaryotic chromosome, such as a human chromosome.

[0470] In some embodiments, the target sequence may be located in a genomic locus; for example, the target sequence may be located in a coding sequence of a gene, an intron sequence of a gene, a regulatory sequence, a transcriptional control sequence of a gene, a translational control sequence of a gene, a splicing site, or a non-coding sequence between genes (e.g., intergenic space). In some embodiments, the gene may be a protein coding gene. In other embodiments, the gene may be a non-coding RNA gene. In some embodiments, the target sequence may comprise all or a portion of a disease-associated gene. In some embodiments, the target sequence may be located in a non-genic functional site in the genome, for example a site that controls aspects of chromatin organization, such as a scaffold site or locus control region.

[0471] In some embodiments involving a Cas nuclease, such as a Class 2 Cas nuclease, the target sequence may be adjacent to a protospacer adjacent motif (“PAM”). In some embodiments, the PAM may be adjacent to or within 1, 2, 3, or 4, nucleotides of the 3′ end of the target sequence. The length and the sequence of the PAM may depend on the Cas protein used. For example, the PAM may be selected from a consensus or a particular PAM sequence for a specific Spy Cas9 protein or Spy Cas9 ortholog, including those disclosed in FIG. 1 of Ran et al., Nature, 520: 186-191 (2015), and Figure S5 of Zetsche 2015, the relevant disclosure of each of which is incorporated herein by reference. In some embodiments, the PAM may be 2, 3, 4, 5, 6, 7, 8, 9, or 10 nucleotides in length. Non-limiting exemplary PAM sequences include NGG, NGGNG, NG, NAAAAN, NNAAAAW, NNNNACA, GNNNCNNA, TTN, and NNNNGATT (wherein N is defined as any nucleotide, and W is defined as either A or T). In some embodiments, the PAM sequence may be NGG. In some embodiments, the PAM sequence may be NGGNG. In some embodiments, the PAM sequence may be TTN. In some embodiments, the PAM sequence may be NNAAAAW.

[0472] In some embodiments, the PAM may be selected from a consensus or a particular PAM sequence for a specific Nme Cas9 protein or Nme Cas9 ortholog (Edraki et al., 2019). In some embodiments, the Nme Cas9 PAM may comprise 2, 3, 4, 5, 6, 7, 8, 9, or 10 nucleotides in length. Non-limiting exemplary PAM sequences include NCC, N4GAYW, N4GYTT, N4GTCT, NNNNCC(a), NNNNCAAA (wherein N is defined as any nucleotide, W is defined as either A or T, and R is defined as either A or G; and (a) is a preferred, but not required, A after the second C)). In some embodiments, the PAM sequence may be NCC.

[0473] In one embodiment, the PAM may be selected from a consensus or a particular PAM sequence for other Class II-C Cas9 orthologs. In some embodiments, the SmuCas9 PAM may comprise one to four required nucleotides selected from the group consisting of N₄CN₃, N₄CT, N₄CCN, N₄CCA, and N₄GNT₃. In one embodiment, the one to four required nucleotides are selected from the group consisting of C, CT, CCN, CCA, CN₃ and GNT₂. In one embodiment, Type II-C Cas9 is bound to a truncated sgRNA.

[0474] In some embodiments, the first gRNA that is cognate to the first cleavase or the second gRNA that is cognate to the second cleavase comprises at least one single guide RNA (sgRNA). In some embodiments, the first gRNA that is cognate to the first cleavase or the second gRNA that is cognate to the second cleavase is a short-single guide RNA (short-sgRNA) comprising a conserved portion of an sgRNA comprising a hairpin region, wherein the hairpin region lacks at least 5-10 nucleotides and wherein the short-sgRNA comprises a 5′ end modification or a 3′ end modification or both.

### B. Guide RNA

[0475] In some embodiments, the first guide RNA is a SpyCas9 guide RNA. In the case of a Spy single guide RNA (sgRNA), the above guide sequences may further comprise additional nucleotides to form a sgRNA, e.g., with the following exemplary nucleotide sequence following the 3′ end of the guide sequence: GUUUUAGAGCUAGAAAUAGCAAGUUAAAAUAAGGCUAGUCCGUUAUCAACUUGA AAAAGUGGCACCGAGUCGGUGC (SEQ ID NO: 161) in 5′ to 3′ orientation.

[0476] In the case of a sgRNA, the above guide sequences may further comprise additional nucleotides to form a sgRNA, e.g., with any one of the following exemplary nucleotide sequence following the 3′ end of the guide sequence: GUUUUAGAGCUAGAAAUAGCAAGUUAAAAUAAGGCUAGUCCGUUAUCAACUUGA AAAAGUGGCACCGAGUCGGUGCUUUU (SEQ ID NO: 160) in 5′ to 3′ orientation; or GUUUUAGAGCUAGAAAUAGCAAGUUAAAAUAAGGCUAGUCCGUUAUCAAAAUGG CACCGAGUCGGUGCU (SEQ ID NO: 165) in 5′ to 3′ orientation.

[0477] In the case of a sgRNA, the guide sequences may be integrated into the following modified motif: mN*mN*mN*NNNNNNNNNNNNNNNNNGUUUUAGAmGmCmUmAmGmAmAmAmUmA mGmCAAGUUAAAAUAAGGCUAGUCCGUUAUCAmAmCmUmUmGmAmAmAmAmAm GmUmGmGmCmAmCmCmGmAmGmUmCmGmGmUmGmCmU*mU*mU*mU (SEQ ID NO: 192) where “N” may be any natural or non-natural nucleotide, preferably an RNA nucleotide; sugar moieties of the nucleotide can be ribose, deoxyribose, or similar compounds with substitutions; m is a 2′-O-methyl modified nucleotide, and * is a phosphorothioate linkage to the adjacent nucleotide residue; and wherein the N's are collectively the nucleotide sequence of a guide sequence. In the context of a modified sequence, unless otherwise indicated, A, C, G, N, and U are an unmodified RNA nucleotide, i.e., a 2′-OH sugar moiety with a phosphodiesterase linkage to the adjacent nucleotide residue, or a 5′-terminal P04.

[0478] In the case of a sgRNA, the guide sequences may further comprise a SpyCas9 sgRNA sequence. An example of a SpyCas9 sgRNA sequence is shown in Table 39 (SEQ ID NO: 161: GUUUUAGAGCUAGAAAUAGCAAGUUAAAAUAAGGCUAGUCCGUUAUCAACUUGA AAAAGUGGCACCGAGUCGGUGC—“Exemplary SpyCas9 sgRNA-1”), included at the 3′ end of the guide sequence, and provided with the domains as shown in Table 39 below. LS is lower stem. B is bulge. US is upper stem. H1 and H2 are hairpin 1 and hairpin 2, respectively. Collectively H1 and H2 are referred to as the hairpin region. A model of the structure is provided in FIG. 10A of WO2019237069 which is incorporated herein by reference.

[0479] The nucleotide sequence of Exemplary SpyCas9 sgRNA-1 may serve as a template sequence for specific chemical modifications, sequence substitutions and truncations.

[0480] In certain embodiments, the gRNA is an sgRNA or a dgRNA, for example, and it optionally comprises a chemical modification. In some embodiments, the modified sgRNA comprises a guide sequence and a SpyCas9 sgRNA sequence, e.g., Exemplary SpyCas9 sgRNA-1. A gRNA, such as an sgRNA, may include modifications on the 5′ end of the guide sequence or on the 3′ end of the SpyCas9 sgRNA sequence, such as, e.g., Exemplary SpyCas9 sgRNA-1 at one or more of the terminal nucleotides, e.g., at 1, 2, 3, or 4 of the nucleotides at the 3′ end or at the 5′ end. In certain embodiments, the modified nucleotide is selected from a 2′-O-methyl (2′-OMe) modified nucleotide, a 2′-O-(2-methoxyethyl) (2′-O-moe) modified nucleotide, a 2′-fluoro (2′-F) modified nucleotide, a phosphorothioate (PS) linkage between nucleotides, or an inverted abasic modified nucleotide; or a combination thereof. In certain embodiments, the modified nucleotide includes a 2′-OMe modified nucleotide. In certain embodiments, the modified nucleotide includes a PS linkage. In certain embodiments, the modified nucleotide includes a 2′-OMe modified nucleotide and a PS linkage.

[0481] In certain embodiments, using SEQ ID NO: 161(“Exemplary SpyCas9 sgRNA-1”) as an example, the Exemplary SpyCas9 sgRNA-1 further includes one or more of: (A) a shortened hairpin 1 region, or a substituted and optionally shortened hairpin 1 region, wherein (1) at least one of the following pairs of nucleotides are substituted in hairpin 1 with Watson-Crick pairing nucleotides: H1-1 and H1-12, H1-2 and H1-11, H1-3 and H1-10, or H1-4 and H1-9, and the hairpin 1 region optionally lacks (a) any one or two of H1-5 through H1-8, (b) one, two, or three of the following pairs of nucleotides: H1-1 and H1-12, H1-2 and H1-11, H1-3 and H1-10, and H1-4 and H1-9, or (c) 1-8 nucleotides of hairpin 1 region; or (2) the shortened hairpin 1 region lacks 4-8 nucleotides, preferably 4-6 nucleotides, and (a) one or more of positions H1-1, H1-2, or H1-3 is deleted or substituted relative to Exemplary SpyCas9 sgRNA-1 (SEQ ID NO: 161), or (b) one or more of positions H1-6 through H1-10 is substituted relative to Exemplary SpyCas9 sgRNA-1(SEQ ID NO: 161); or (3) the shortened hairpin 1 region lacks 5-10 nucleotides, preferably 5-6 nucleotides, and one or more of positions N18, H1-12, or n is substituted relative to Exemplary SpyCas9 sgRNA-1 (SEQ ID NO: 161); or (B) a shortened upper stem region, wherein the shortened upper stem region lacks 1-6 nucleotides and wherein the 6, 7, 8, 9, 10, or 11 nucleotides of the shortened upper stem region include less than or equal to 4 substitutions relative to Exemplary SpyCas9 sgRNA-1 (SEQ ID NO: 161); or (C) a substitution relative to Exemplary SpyCas9 sgRNA-1 (SEQ ID NO: 161) at any one or more of LS6, LS7, US3, US10, B3, N7, N15, N17, H2-2 and H2-14, wherein the substituent nucleotide is neither a pyrimidine that is followed by an adenine, nor an adenine that is preceded by a pyrimidine; or (D) an Exemplary SpyCas9 sgRNA-1 (SEQ ID NO: 161) with an upper stem region, wherein the upper stem modification comprises a modification to any one or more of US1-US12 in the upper stem region, wherein (1) the modified nucleotide is optionally selected from a 2′-O-methyl (2′-OMe) modified nucleotide, a 2′-O-(2-methoxyethyl) (2′-O-moe) modified nucleotide, a 2′-fluoro (2′-F) modified nucleotide, a phosphorothioate (PS) linkage between nucleotides, an inverted abasic modified nucleotide, or a combination thereof, or (2) the modified nucleotide optionally includes a 2′-OMe modified nucleotide.

[0482] In some embodiments, the unmodified sgRNA comprises the following sequence:

(SEQ ID NO: 176)
(N)₂₀GUUUUAGAGCUAGAAAUAGCAAGUUAAAAUAAGGCUAGUCCGUUA
UCACGAAAGGGCACCGAGUCGGUGC;
or
(SEQ ID NO: 177)
(N)₂₀GUUUUAGAGCUAGAAAUAGCAAGUUAAAAUAAGGCUAGUCCGUUA
UCACGAAAGGGCACCGAGUCGGUGCU.

[0483] In some embodiments, the sgRNA comprises a modified motif disclosed herein, including any modified motif shown in Tables 2B, 2C, 3B, and 4, where a guide RNA, or “N” may be any natural or non-natural nucleotide, preferably an RNA nucleotide; sugar moieties of the nucleotide can be ribose, deoxyribose, or similar compounds with substitutions; m is a 2′-O-methyl modified nucleotide, and * is a phosphorothioate linkage to the adjacent nucleotide residue; and wherein the N's are collectively the nucleotide sequence of a guide sequence.

[0484] In the context of a modified sequence, unless otherwise indicated, A, C, G, N, and U are an unmodified RNA nucleotide, i.e., a 2′-OH sugar moiety with a phosphodiester linkage to the adjacent nucleotide residue, or a 5′-terminal PO4.

[0485] In some embodiments, the first guide RNA that directs the first cleavase to a first genomic locus is a SpyCas9 guide RNA. In some embodiments, the SpyCas9 guide RNA is a single guide RNA comprising: a conserved portion of an sgRNA comprising an upper stem and hairpin region, wherein every nucleotide in the upper stem region is modified with 2′-O-Me, and every nucleotide in the hairpin region is modified with 2′-O-Me; a 3′ end modification comprising 2′-O-Me modified nucleotides at the last three nucleotides of the 3′ end and phosphorothioate (PS) bonds between the last four nucleotides of the 3′ end; and 5′ end modification comprising 2′-O-Me modified nucleotides at the first three nucleotides of the 5′ end; and phosphorothioate (PS) bonds between the first four nucleotides of the 5′ end.

[0486] In some embodiments, the SpyCas9 guide RNA is a short-single guide RNA (short-sgRNA) comprising a conserved portion of an sgRNA comprising a hairpin region, wherein the hairpin region lacks at least 5-10 nucleotides and wherein the short-sgRNA comprises (i) a 5′ end modification or (ii) a 3′ end modification.

[0487] In some embodiments, the first guide RNA is a SpyCas9 guide RNA that is a single guide RNA comprising a nucleotide sequence selected from SEQ ID NOs: 159-167, 170-177, and 180-194, or a nucleotide sequence that is at least 85%, at least 90%, or at least 95% identical to SEQ ID NOs: 159-167, 170-177, and 180-194.

[0488] In some embodiments, the sgRNA comprises Exemplary SpyCas9 sgRNA-1 or the modified versions thereof provided herein, or a version as provided in Table 2B, where the totality of the N's comprise a guide sequence that directs a nuclease to a target sequence. Each N is independently modified or unmodified. In certain embodiments, in the absence of an indication of a modification, the nucleotide is an unmodified RNA nucleotide residue, i.e., a ribose sugar and a phosphodiester backbone.

TABLE 2A
Exemplary Unmodified Spy Cas9 Scaffold Sequences

| #mer | Unmodified nucleotide sequence | SEQ ID NO |
|---|---|---|
| | GUUUUAGAGCUAUGCUGUUUUG | 159 |
| 100 | GUUUUAGAGCUAGAAAUAGCAAGUUAAAAUAAG | 160 |
| | GCUAGUCCGUUAUCAACUUGAAAAAGUGGCACCG | |
| | AGUCGGUGCUUUU | |
| 96 | GUUUUAGAGCUAGAAAUAGCAAGUUAAAAUAAG | 161 |
| | GCUAGUCCGUUAUCAACUUGAAAAAGUGGCACCG | |
| | AGUCGGUGC | |
| 97 | GUUUUAGAGCUAGAAAUAGCAAGUUAAAAUAAG | 162 |
| | GCUAGUCCGUUAUCAACUUGAAAAAGUGGCACCG | |
| | AGUCGGUGCU | |
| 88 | GUUUUAGAGCUAGAAAUAGCAAGUUAAAAUAAG | 163 |
| | GCUAGUCCGUUAUCAACUUGGCACCGAGUCGGUG | |
| | C | |
| 88 | GUUUUAGAGCUAGAAAUAGCAAGUUAAAAUAAG | 164 |
| | GCUAGUCCGUUAUCAAAAUGGCACCGAGUCGGUG | |
| | C | |
| 89 | GUUUUAGAGCUAGAAAUAGCAAGUUAAAAUAAG | 165 |
| | GCUAGUCCGUUAUCAAAAUGGCACCGAGUCGGUG | |
| | CU | |
| 90 | GUUUUAGAGCUAGAAAUAGCAAGUUAAAAUAAG | 166 |
| | GCUAGUCCGUUAUCACGAAAGGGCACCGAGUCGG | |
| | UGC | |
| 91 | GUUUUAGAGCUAGAAAUAGCAAGUUAAAAUAAG | 167 |
| | GCUAGUCCGUUAUCACGAAAGGGCACCGAGUCGG | |
| | UGCU | |

TABLE 2B
Exemplary Unmodified Spy Cas9 Guide RNA Sequences

| | | SEQ |
|---|---|---|
| #mer | Unmodified nucleotide sequence | ID NO |
| 100 | (N)20GUUUUAGAGCUAGAAAUAGCAAGUUAAAAU | 170 |
| | AAGGCUAGUCCGUUAUCAACUUGAAAAAGUGGC | |
| | ACCGAGUCGGUGCUUUU | |
| 96 | (N)20GUUUUAGAGCUAGAAAUAGCAAGUUAAAAU | 171 |
| | AAGGCUAGUCCGUUAUCAACUUGAAAAAGUGGC | |
| | ACCGAGUCGGUGC | |
| 97 | (N)20GUUUUAGAGCUAGAAAUAGCAAGUUAAAAU | 172 |
| | AAGGCUAGUCCGUUAUCAACUUGAAAAAGUGGC | |
| | ACCGAGUCGGUGCU | |
| 88 | (N)20GUUUUAGAGCUAGAAAUAGCAAGUUAAAAU | 173 |
| | AAGGCUAGUCCGUUAUCAACUUGGCACCGAGUCG | |
| | GUGC | |
| 88 | (N)20GUUUUAGAGCUAGAAAUAGCAAGUUAAAAU | 174 |
| | AAGGCUAGUCCGUUAUCAAAAUGGCACCGAGUCG | |
| | GUGC | |
| 88 | (N)20GGUUUUAGAGCUAGAAAUAGCAAGUUAAAA | 175 |
| | UAAGGCUAGUCCGUUAUCAAAAUGGCACCGAGUC | |
| | GGUGC | |
| 90 | (N)20GUUUUAGAGCUAGAAAUAGCAAGUUAAAAU | 176 |
| | AAGGCUAGUCCGUUAUCACGAAAGGGCACCGAGU | |
| | CGGUGC | |
| 91 | (N)20GUUUUAGAGCUAGAAAUAGCAAGUUAAAAU | 177 |
| | AAGGCUAGUCCGUUAUCACGAAAGGGCACCGAGU | |
| | CGGUGCU | |

wherein the Ns collectively are a guide sequence provided herein. Within the table, in the context of an unmodified sequence, A, C, G, U, and N are, independently, any natural or non-natural adenine, cytosine, guanine, uracil, and any nucleotide (e.g., A, C, G, or U), respectively.

TABLE 2C
Exemplary Modified Spy Guide Scaffold Sequences

| | | SEQ |
|---|---|---|
| | | ID |
| #mer | Modified sequence | NO |
| 100 | GUUUUAGAmGmCmUmAmGmAmAmAmUmAmGmCAAGUUAA | 180 |
| | AAUAAGGCUAGUCCGUUAUCAmAmCmUmUmGmAmAmAmA | |
| | mAmGmUmGmGmCmAmCmCmGmAmGmUmCmGmGmUmGmCm | |
| | U*mU*mU*mU | |
| 96 | GUUUUAGAmGmCmUmAmGmAmAmAmUmAmGmCAAGUUAA | 181 |
| | AAUAAGGCUAGUCCGUUAUCAmAmCmUmUmGmAmAmAmA | |
| | mAmGmUmGmGmCmAmCmCmGmAmGmUmCmGmGmUmGmC | |
| 97 | GUUUUAGAmGmCmUmAmGmAmAmAmUmAmGmCAAGUUAA | 182 |
| | AAUAAGGCUAGUCCGUUAUCAmAmCmUmUmGmAmAmAmA | |
| | mAmGmUmGmGmCmAmCmCmGmAmGmUmCmGmGmUmGmCm | |
| | U | |
| 88 | GUUUUAGAmGmCmUmAmGmAmAmAmUmAmGmCAAGUUAA | 183 |
| | AAUAAGGCUAGUCCGUUAUCAACUUGGCACCGAGUCGG* | |
| | mU*mG*mC | |
| 88 | GUUUUAGAmGmCmUmAmGmAmAmAmUmAmGmCAAGUUAA | 184 |
| | AAUAAGGCUAGUCCGUUAUCAAAAUGGCACCGAGUCGG* | |
| | mU*mG*mC | |
| 88 | GUUUUAGAmGmCmUmAmGmAmAmAmUmAmGmCAAGUUAA | 185 |
| | AAUAAGGCUAGUCCGUUAUCAmAmAmAmUmGmGmCmAmC | |
| | mCmGmAmGmUmCmGmG*mU*mG*mC | |
| 90 | GUUUUAGAmGmCmUmAmGmAmAmAmUmAmGmCAAGUUAA | 186 |
| | AAUAAGGCUAGUCCGUUAUCACGAAAGGGCACCGAGUCG | |
| | G*mU*mG*mC | |
| 90 | GUUUUAGAmGmCmUmAmGmAmAmAmUmAmGmCAAGUUAA | 187 |
| | AAUAAGGCUAGUCCGUUAUCAmCmGmAmAmAmGmGmGmC | |
| | mAmCmCmGmAmGmUmCmGmG*mU*mG*mC | |
| 91 | GUUUUAGAmGmCmUmAmGmAmAmAmUmAmGmCAAGUUAA | 188 |
| | AAUAAGGCUAGUCCGUUAUCACGAAAGGGCACCGAGUCG | |
| | GU*mG*mC*mU | |
| 91 | GUUUUAGAmGmCmUmAmGmAmAmAmUmAmGmCAAGUUAA | 189 |
| | AAUAAGGCUAGUCCGUUAUCACGAAAGGGCACCGAGUCG | |
| | GmUmGmC*mU | |
| 91 | GUUUfUAGmAmGmCmUmAmGmAmAmAmUmAmGmCmAmAG | 190 |
| | UfUmAfAmAfAmUAmAmGmGmCmUmAGUmCmCGUfUAmU | |
| | mCAmCmGmAmAmAmGmGmGmCmAmCmCmGmAmGmUmCmG | |
| | mGmU*mG*mC*mU | |
| 91 | GUUUUAGAmGmCmUmAmGmAmAmAmUmAmGmCAAGUUAA | 191 |
| | AAUAAGGCUAGUCCGUUAUCACGAAAGGGCACCGAGUCG | |
| | GmU*mG*mC*mU | |

wherein “m” indicates a 2′-O-Me modification, “f” indicates a 2′-fluoro modification, a “*” indicates a phosphorothioate linkage between nucleotides, and no modification in the context of a modified sequence indicates an RNA (2′-OH) and phosphodiesterase linkage to the 3′ nucleotide when one is present.

[0489] In certain embodiments, the guide sequence is a chemically modified sequence. In certain embodiments, the chemically modified guide sequence is (mN*)3(N)13-17. In certain embodiments, the guide sequence is (mN*)3(N)17, i.e., mN*mN*mN*NNNNNNNNNNNNNNNNN. In certain embodiments, each N of the (N)13-17 or the (N)17 is unmodified. In certain embodiments, each N in the (N)13-17 or the (N)17 is independently modified, e.g., independently modified with a 2′-O-methyl modification.

In some embodiments, the sgRNA disclosed herein may be modified as shown herein or in the sequence mN*mN*mN*NNNNNNNNNNNNNNNNN GUUUUAGAmGmCmUmAmGmAmAmAmUmAmGmCAAGUUAAAAUAAGGCUAGUCC GUUAUCACGAAAGGGCACCGAGUCGG*mU*mG*mC (SEQ ID NO: 193).
In some embodiments, the sgRNA disclosed herein may be modified as shown herein or in the sequence mN*mN*mN*NNNNNNNNNNNNNNNNN GUUUUAGAmGmCmUmAmGmAmAmAmUmAmGmCAAGUUAAAAUAAGGCUAGUCC GUUAUCACGAAAGGGCACCGAGUCGGmU*mG*mC*mU (SEQ ID NO: 194).

[0490] In some embodiments, the guide RNA is a Campylobacter jejuni Cas9 (“CjeCas9”) guide RNA. In some embodiments, the guide RNA is a modified CjeCas9 guide RNA.

[0491] In some embodiments, the guide RNA is a Simonsiella muelleri Cas9 (“SmuCas9”) guide RNA. In some embodiments, the guide RNA is a modified SmuCas9 guide RNA.

[0492] In some embodiments, the second guide RNA disclosed herein is a NmeCas9 guide RNA. In some embodiments, the second guide RNA is a NmeCas9 guide RNA that is a single guide RNA comprising a nucleotide sequence selected from SEQ ID NOs: 280-297, or a nucleotide sequence that is at least 85%, at least 90%, or at least 95% identical to SEQ ID NOs: 280-297. In some embodiments, the second guide comprises one or more internal polyethylene glycol (PEG) linker. In some embodiments, the second guide RNA comprising internal linkers comprise a sequence selected from SEQ ID NOs: 161-169.

[0493] In certain embodiments, using SEQ ID NO: 279 (“Exemplary NmeCas9 sgRNA-1”) as an example, the Exemplary NmeCas9 sgRNA-1 includes: (A) A guide RNA (gRNA) comprising a guide region and a conserved region, the conserved region comprising one or more of: (a) a shortened repeat/anti-repeat region, wherein the shortened repeat/anti-repeat region lacks 2-24 nucleotides, wherein (i) one or more of nucleotides 37-48 and 53-64 is deleted and optionally one or more of nucleotides 37-64 is substituted relative to SEQ ID NO: 279; and (ii) nucleotide 36 is linked to nucleotide 65 by at least 2 nucleotides; or (b) a shortened hairpin 1 region, wherein the shortened hairpin 1 lacks 2-10, optionally 2-8 nucleotides, wherein (i) one or more of nucleotides 82-86 and 91-95 is deleted and optionally one or more of positions 82-96 is substituted relative to SEQ ID NO: 279; and (ii) nucleotide 81 is linked to nucleotide 96 by at least 4 nucleotides; or (c) a shortened hairpin 2 region, wherein the shortened hairpin 2 lacks 2-18, optionally 2-16 nucleotides, wherein (i) one or more of nucleotides 113-121 and 126-134 is deleted and optionally one or more of nucleotides 113-134 is substituted relative to SEQ ID NO: 279; and (ii) nucleotide 112 is linked to nucleotide 135 by at least 4 nucleotides; wherein one or both nucleotides 144-145 are optionally deleted relative to SEQ ID NO: 279; wherein optionally at least 10 nucleotides are modified nucleotides.

[0494] Exemplary unmodified conserved portion nucleotide sequences are provided in Table 3A.

[0495] In the case of a sgRNA, the guide sequences may be integrated into one of the following exemplary modified conserved portion motifs as shown in Table 3B.

[0496] In certain embodiments, the guide sequence is 20-25 nucleotides in length ((N)20-25), wherein each nucleotide may be independently modified. In certain embodiments, each of nucleotides 1-3 of the 5′ end of the guide is independently modified. In certain embodiments, each of nucleotides 1-3 of the 5′ end of the guide is independently modified with a 2′-OMe modification. In certain embodiments, each of nucleotides 1-3 of the 5′ end of the guide is independently modified with a phosphorothioate linkage to the adjacent nucleotide residue. In certain embodiments, each of nucleotides 1-3 of the 5′ end of the guide is independently modified with a 2′-OMe modification and a phosphorothioate linkage to the adjacent nucleotide residue.

[0497] In the case of a sgRNA, modified guide sequences may be integrated into one of the following exemplary modified conserved portion motifs as shown in Table 3B.

[0498] In some embodiments, the guide RNA comprises a sgRNA comprising a guide region and a conserved portion of an sgRNA, for example, the conserved portion of sgRNA shown as Exemplary NmeCas9 sgRNA-1 or the conserved portions of the gRNAs shown in Table 3A-31B and throughout the specification.

[0499] In some embodiments, the sgRNA comprises Exemplary NmeCas9 sgRNA-1 or the modified versions thereof provided herein, or a version as provided in Table 3B. Each N is independently modified or unmodified. In certain embodiments, in the absence of an indication of a modification, the nucleotide is an unmodified RNA nucleotide residue, i.e., a ribose sugar and a phosphodiester backbone.

TABLE 3A
Unmodified Nme Conserved Region
Nucleotide Sequences

| | Unmodified nucleotide | SEQ |
|---|---|---|
| #mer | sequence of conserved portion | ID NO |
| 145 | GUUGUAGCUCCCUUUCUCAUUUCGGAAACGAAAUGAGAACC | 280 |
| | GUUGCUACAAUAAGGCCGUCUGAAAAGAUGUGCCGCAACGC | |
| | UCUGCCCCUUAAAGCUUCUGCUUUAAGGGGCAUCGUUUA | |
| 101 | GUUGUAGCUCCCUGAAACCGUUGCUACAAUAAGGCCGUCGA | 281 |
| | AAGAUGUGCCGCAACGCUCUGCCUUCUGGCAUCGUU | |
| 105 | GUUGUAGCUCCCUUCGAAAGACCGUUGCUACAAUAAGGCCG | 282 |
| | UCGAAAGAUGUGCCGCAACGCUCUGCCUUCUGGCAUCGUU | |
| 107 | GUUGUAGCUCCCUGGAAACCCGUUGCUACAAUAAGGCCGUC | 283 |
| | GAAAGAUGUGCCGCAACGCUCUGCCUUCUGGCAUCGUUUAU | |
| | U | |

TABLE 3B
Exemplary Modified Nme Guide RNA Motifs

| | Modified nucleotide sequence | SEQ |
|---|---|---|
| #mer | of conserved portion | ID NO |
| 101 | mGUUGmUmAmGmCUCCCmUmGmAmAmAmCmCGUUmGmCUA | 284 |
| | mCAAU*AAGmGmCCmGmUmCmGmAmAmAmGmAmUGUGCmC | |
| | GCmAmAmCmGCUCUmGmCCmUmUmCmUGmGCmAmUC*mG* | |
| | mU*mU | |
| 101 | mGUUGmUmAmGmCUCCCmUmGmAmAmAmCmCGUUmGmCUA | 285 |
| | mCAAU*AAGmGmCCmGmUmCmGmAmAmAmGmAmUGUGCmC | |
| | GmCAAmCGCUCUmGmCCmUmUmCmUGGCAUCG*mU*mU | |
| 101 | mGUUGmUmAmGmCUCCCmUmGmAmAmAmCmCGUUmGmCUA | 286 |
| | mCAAUAAGmGmCCmGmUmCmGmAmAmAmGmAmUGUGCmCG | |
| | mCAAmCGCUCUmGmCCmUmUmCmUGGCAUCG*mU*mU | |
| 101 | mGUUGmUmAmGmCUCCCmUmGmAmAmAmCmCGUUmGmCUA | 287 |
| | mCAAU*AAGmGmCCmGmUmCmGmAmAmAmGmAmUGUGCmC | |
| | GmCAAmCGmCmUmCmUmGmCCmUmUmCmUGGCAUCG*mU*m | |
| | U | |
| 101 | mGUUGmUmAmGmCUCCCmUmGmAmAmAmCmCGUUmGmCUA | 288 |
| | mCAAUAAGmGmCCmGmUmCmGmAmAmAmGmAmUGUGCmCG | |
| | mCAAmCGmCmUmCmUmGmCCmUmUmCmUGGCAUCG*mU*mU | |
| 105 | mGUUGmUmAmGmCUCCCmUmUmCmGmAmAmAmGmAmCmCG | 289 |
| | UUmGmCUAmCAAU*AAGmGmCCmGmUmCmGmAmAmAmGmA | |
| | mUGUGCmCGmCAAmCGCUCUmGmCCmUmUmCmUGGCAUCG* | |
| | mU*mU | |
| 105 | mGUUGmUmAmGmCUCCCmUmUmCmGmAmAmAmGmAmCmCG | 290 |
| | UUmGmCUAmCAAUAAGmGmCCmGmUmCmGmAmAmAmGmAm | |
| | UGUGCmCGmCAAmCGCUCUmGmCCmUmUmCmUGGCAUCG*m | |
| | U*mU | |
| 105 | mGUUGmUmAmGmCUCCCmUmUmCmGmAmAmAmGmAmCmCG | 291 |
| | UUmGmCUAmCAAU*AAGmGmCCmGmUmCmGmAmAmAmGmA | |
| | mUGUGCmCGmCAAmCGmCmUmCmUmGmCCmUmUmCmUGGC | |
| | AUCG*mU*mU | |
| 105 | mGUUGmUmAmGmCUCCCmUmUmCmGmAmAmAmGmAmCmCG | 292 |
| | UUmGmCUAmCAAUAAGmGmCCmGmUmCmGmAmAmAmGmAm | |
| | UGUGCmCGmCAAmCGmCmUmCmUmGmCCmUmUmCmUGGCA | |
| | UCG*mU*mU | |
| | mN*mNNNNNNNNmNNNmNNNNNNNNNNNNmGUUGmUmAmG | 293 |
| | mCUCCCmUmGmAmAmAmCmCGUUmGmCUAmCAAU*AAGmG | |
| | mCCmGmUmCmGmAmAmAmGmAmUGUGCmCGCmAmAmCmGC | |
| | UCUmGmCCmUmUmCmUGmGCmAmUC*mG*mU*mU | |
| | (N)20-25 | 294 |
| | GUUGmUmAmGmCUCCCmUmGmAmAmAmCmCGUUmGmCUAm | |
| | CAAU*AAGmGmCCmGmUmCmGmAmAmAmGmAmUGUGCmCG | |
| | CmAmAmCmGCUCUmGm | |
| | CCmUmUmCmUGmGCmAmUC*mG*mU*mU | |
| | mN*mN*mN*mNmNNNmNmNNmNNmNNNNNmNNNNmNNNmG | 295 |
| | UUGmUmAmGmCUCCCmUmGmAmAmAmCmCGUUmGmCUAmC | |
| | AAU*AAGmGmCCmGmUmCmGmAmAmAmGmAmUGUGCmCGm | |
| | CAAmCGCUCUmGmCCmUmUmCmUGGCAUCG*mU*mU | |
| | mN*mN*mN*N(21)GUUGUAGCUCCCU*mG*mA*mA*mA*CCGU | 296 |
| | UGCUACAAUAAGGCCGUmC*mU*mG*mA*mA*mA*mA*mGAU | |
| | GUGCCGCAACGCUCUGCCG*mC*mU*mU*mC*mU*mG*CGGCA | |
| | UCGUUU*mA*mU*mC | |
| | mN*mN*mN*N(21)GUUGUAGCUCCCU*mG*mA*mA*mA*CCGU | 297 |
| | UGCUACAAUAAGGCCGUmC*mG*mA*mA*mA*mGAUGUGCCG | |
| | CAACGCUCUGCCmU*mU*mC*mUGGCAUCGUUU*mA*mU*mC | |

wherein “m” indicates a 2'-O-Me modification, and a “*” indicates a phosphorothioate linkage between nucleotides, and no modification in the context of a modified sequence indicates an RNA (2'-OH) and a phosphorothioate linkage.

[0500] In certain embodiments, the guide sequence is a chemically modified sequence. In certain embodiments, the chemically modified guide sequence is (mN*)3(N)17-22. In certain embodiments, the guide sequence is (mN*)3(N)21, i.e., mN*mN*mN*NNNNNNNNNNNNNNNNNNNNN. In certain embodiments, each N of the (N)17-22 or the (N)21 is unmodified. In certain embodiments, the each N in the (N)18-21 or the (N)21 is independently modified, e.g. independently modified with a 2′-O-methyl modification.

[0501] The shortened NmeCas9 gRNA may comprise internal linkers disclosed herein. “Internal linker” as used herein describes a non-nucleotide segment joining two nucleotides within a guide RNA. If the gRNA contains a guide region, the internal linker is located outside of the spacer region (e.g., in the scaffold or conserved region of the gRNA). For Type V guides, it is understood that the last hairpin is the only hairpin in the structure, i.e., the repeat-anti-repeat region. In some embodiments, the internal linker comprises a PEG-linker disclosed herein. Exemplary locations of the linkers are as shown in the following: (N)₂₀₋₂₅ GUUGUAGCUCCCUUC(L1)GACCGUUGCUACAAUAAGGCCGUC(L1)GAUGU GCCGCAACGCUCUGCC(L1)GGCAUCGUU (SEQ ID NO: 272). As used herein, (L1) refers to an internal linker having a bridging length of about 15-21 atoms. In some embodiments, the internal linker comprises a polyethylene glycol (PEG) linker. The guide RNAs comprising an internal linker disclosed herein comprise one of the structures/modification patterns disclosed in WO2022/261292, the contents of which are hereby incorporated by reference in its entirety. Further exemplary NmeGuide RNA comprising linkers are provided in Table 4.

[0502] In some embodiments, the shortened NmeCas9 guide RNA comprising internal linkers may be chemically modified as shown in Table 4. In certain embodiments, the guide sequence is a chemically modified sequence as shown in Table 4.

TABLE 4
Exemplary Modified Nme Guide RNA Motifs

| SEQ | | |
|---|---|---|
| ID | | |
| NO | Description | Sequence |
| 272 | Shortened/unmodified | (N)₂₀₋₂₅ |
| | NmeCas9 guide RNA | GUUGUAGCUCCCUUC(L1)GACCGUUGCUAC |
| | comprising linkers | AAUAAGGCCGUC(L1)GAUGUGCCGCAACGC |
| | | UCUGCC(L1)GGCAUCGUU |
| 273 | Shortened/modified NmeCas9 | GUUGmUmAmGmCUCCCmUmUmC(L1)mGmA |
| | guide RNA comprising linkers | mCmCGUUmGmCUAmCAAU*AAGmGmCCmG |
| | (conserved portion only) | mUmC(L1)mGmAmUGUGCmCGmCAAmCGCU |
| | | CUmGmCC(L1)GGCAUCG*mU*mU |
| 274 | Shortened/modified NmeCas9 | GUUGmUmAmGmCUCCCUmC(L1)mGCCGUU |
| | guide RNA comprising linkers | mGmCUAmCAAU*A*AGmGmCCmGmUmC(L1) |
| | (conserved portion only) | mGmAmUGUGCmCGCAACGCUCUmGmCC(L1) |
| | | GGCAUCGUUU*AmU*mU |
| 275 | Shortened/modified NmeCas9 | GUUGmUmAmGmCUCCCmUmUmC(L1)mGmA |
| | guide RNA comprising linkers | mCmCGUUmGmCUAmCAAU*AAGmGmCCmG |
| | (conserved portion only) | mUmC(L1)mGmAmUGUGCmCGmCAAmCGCU |
| | | CUmGmCC(L1)GGCAUCGmU*mU |
| 276 | Shortened/modified NmeCas9 | mN*mN*mN*mNmNNNmNmNNmNNmNNNNN |
| | guide RNA comprising linkers | mNNNNmNNNmGUUGmUmAmGmCUCCCmU |
| | | mUmC(L1)mGmAmCmCGUUmGmCUAmCAAU |
| | | *AAGmGmCCmGmUmC(L1)mGmAmUGUGCm |
| | | CGmCAAmCGCUCUmGmCC(L1)GGCAUCG*m |
| | | U*mU |
| 277 | Shortened/modified NmeCas9 | mN*mNN*NNNNNNmNNNmNNNNNNNNNNN |
| | guide RNA comprising linkers | mGUUGmUmAmGmCUCCCUmC(L1)mGCCGU |
| | | UmGmCUAmCAAU*A*AGmGmCCmGmUmC |
| | | (L1)mGmAmUGUGCmCGCAACGCUCUmGmC |
| | | C(L1)GGCAUCGUUU*AmU*mU |
| 278 | Shortened/modified NmeCas9 | mN*mN*mN*mNmNNNmNmNNmNNmNNNNN |
| | guide RNA comprising linkers | mNNNNmNNNmGUUGmUmAmGmCUCCCmU |
| | | mUmC(L1)mGmAmCmCGUUmGmCUAmCAAU |
| | | *AAGmGmCCmGmUmC(L1)mGmAmUGUGCm |
| | | CGmCAAmCGCUCUmGmCC(L1)GGCAUCGmU |
| | | *mU |

[0503] In certain embodiments, Exemplary SpyCas9 sgRNA-1, or an sgRNA, such as an sgRNA comprising an Exemplary SpyCas9 sgRNA-1, further includes a 3′ tail, e.g., a 3′ tail of 1, 2, 3, 4, or more nucleotides. In certain embodiments, the tail includes one or more modified nucleotides. In certain embodiments, the modified nucleotide is selected from a 2′-O-methyl (2′-OMe) modified nucleotide, a 2′-O-(2-methoxyethyl) (2′-O-moe) modified nucleotide, a 2′-fluoro (2′-F) modified nucleotide, a phosphorothioate (PS) linkage between nucleotides, an inverted abasic modified nucleotide; or a combination thereof. In certain embodiments, the modified nucleotide includes a 2′-OMe modified nucleotide. In certain embodiments, the modified nucleotide includes a PS linkage between nucleotides. In certain embodiments, the modified nucleotide includes a 2′-OMe modified nucleotide and a PS linkage between nucleotides.

[0504] In certain embodiments, the hairpin region includes one or more modified nucleotides. In certain embodiments, the modified nucleotide is selected from a 2′-O-methyl (2′-OMe) modified nucleotide, a 2′-O-(2-methoxyethyl) (2′-O-moe) modified nucleotide, a 2′-fluoro (2′-F) modified nucleotide, a phosphorothioate (PS) linkage between nucleotides, an inverted abasic modified nucleotide; or a combination thereof. In certain embodiments, the modified nucleotide includes a 2′-OMe modified nucleotide.

[0505] In certain embodiments, the upper stem region includes one or more modified nucleotides. In certain embodiments, the modified nucleotide selected from a 2′-O-methyl (2′-OMe) modified nucleotide, a 2′-O-(2-methoxyethyl) (2′-O-moe) modified nucleotide, a 2′-fluoro (2′-F) modified nucleotide, a phosphorothioate (PS) linkage between nucleotides, an inverted abasic modified nucleotide; or a combination thereof. In certain embodiments, the modified nucleotide includes a 2′-OMe modified nucleotide.

[0506] In certain embodiments, the Exemplary SpyCas9 sgRNA-1 comprises one or more YA dinucleotides, wherein Y is a pyrimidine, wherein the YA dinucleotide includes a modified nucleotide. In certain embodiments, the modified nucleotide selected from a 2′-O-methyl (2′-OMe) modified nucleotide, a 2′-O-(2-methoxyethyl) (2′-O-moe) modified nucleotide, a 2′-fluoro (2′-F) modified nucleotide, a phosphorothioate (PS) linkage between nucleotides, an inverted abasic modified nucleotide, or a combination thereof. In certain embodiments, the modified nucleotide includes a 2′-OMe modified nucleotide.

[0507] In certain embodiments, the Exemplary SpyCas9 sgRNA-1 comprises one or more YA dinucleotides, wherein Y is a pyrimidine, wherein the YA dinucleotide includes a sequence substituted nucleotide, wherein the pyrimidine is substituted for a purine. In certain embodiments, when the pyrimidine forms a Watson-Crick base pair in the single guide, the Watson-Crick based nucleotide of the sequence substituted pyrimidine nucleotide is substituted to maintain Watson-Crick base pairing.

[0508] In some embodiments, the gRNA is chemically modified. A gRNA comprising one or more modified nucleosides or nucleotides is called a “modified” gRNA or “chemically modified” gRNA, to describe the presence of one or more non-naturally or naturally occurring components or configurations that are used instead of or in addition to the canonical A, G, C, and U residues. In some embodiments, a modified gRNA is synthesized with a non-canonical nucleoside or nucleotide, is here called “modified.” Modified nucleosides and nucleotides can include one or more of: (i) alteration, e.g., replacement, of one or both of the non-linking phosphate oxygens or of one or more of the linking phosphate oxygens in the phosphodiester backbone linkage (an exemplary backbone modification); (ii) alteration, e.g., replacement, of a constituent of the ribose sugar, e.g., of the 2′ hydroxyl on the ribose sugar (an exemplary sugar modification); (iii) modification or replacement of a naturally occurring nucleobase, including with a non-canonical nucleobase (an exemplary base modification); and (iv) modification of the 3′ end or 5′ end of the oligonucleotide to provide exonuclease stability, e.g., with 2′ O-me, 2′ halide, or 2′ deoxy substituted ribose; or inverted abasic terminal nucleotide, or replacement of phosphodiester with phosphothioate.

[0509] Chemical modifications such as those listed above can be combined to provide modified gRNAs or mRNAs comprising nucleosides and nucleotides (collectively “residues”) that can have two, three, four, or more modifications. For example, a modified residue can have a modified sugar and a modified nucleobase. In certain embodiments, all, or substantially all, of the phosphate groups of a gRNA molecule are replaced with phosphorothioate groups. In some embodiments, modified gRNAs comprise at least one modified residue at or near the 5′ end of the RNA. In some embodiments, modified gRNAs comprise at least one modified residue at or near the 3′ end of the RNA.

[0510] In some embodiments, the gRNA comprises one, two, three or more modified residues. In some embodiments, at least 5% (e.g., at least 5%, at least 10%, at least 15%, preferably at least 20%, at least 25%, at least 30%, at least 35%, at least 40%, at least 45%, or at least 50%) of the positions in a modified gRNA are modified nucleosides or nucleotides. In some embodiments, at least 5% of the positions in the modified guide RNA are modified nucleotides or nucleosides. In some embodiments, at least 10% of the positions in the modified guide RNA are modified nucleotides or nucleosides. In some embodiments at least 15% of the positions in the modified gRNA are modified nucleotides or nucleosides. In some embodiments preferably at least 20% of the positions in the modified gRNA are modified nucleotides or nucleosides. In some embodiments, no more than 65% of the positions in the modified gRNA are modified nucleotides. In some embodiments, no more than 55% of the positions in the modified gRNA are modified nucleotides. In some embodiments, no more than 50% of the positions in the modified gRNA are modified nucleotides. In some embodiments, 10-70% of the positions in the modified gRNA are modified nucleotides. In some embodiments, 20-70% of the positions in the modified gRNA are modified nucleotides. In some embodiments, 20-50% of the positions in the modified gRNA are modified nucleotides and the nuclease is a SpyCas9 nuclease. In some embodiments, 30-70% of the positions in the modified gRNA are modified nucleotides and the nuclease is an NmeCas9 nuclease.

[0511] Unmodified nucleic acids can be prone to degradation by, e.g., intracellular nucleases or those found in serum. For example, nucleases can hydrolyze nucleic acid phosphodiester bonds. Accordingly, in one aspect the gRNAs described herein can contain one or more modified nucleosides or nucleotides, e.g., to introduce stability toward intracellular or serum-based nucleases. In some embodiments, the modified gRNA molecules described herein can exhibit a reduced innate immune response when introduced into a population of cells, both in vivo and ex vivo. The term “innate immune response” includes a cellular response to exogenous nucleic acids, including single stranded nucleic acids, which involves the induction of cytokine expression and release, particularly the interferons, and cell death.

[0512] In some embodiments of a backbone modification, the phosphate group of a modified residue can be modified by replacing one or more of the oxygens with a different substituent. Further, the modified residue, e.g., modified residue present in a modified nucleic acid, can include the replacement of an unmodified phosphate moiety with a modified phosphate group as described herein. In some embodiments, the backbone modification of the phosphate backbone can include alterations that result in either an uncharged linker or a charged linker with unsymmetrical charge distribution.

[0513] Examples of modified phosphate groups include, phosphorothioate, borano phosphate esters, methyl phosphonates, phosphoroamidates, phosphodithioate, alkyl or aryl phosphonates and phosphotriesters. The phosphorous atom in an unmodified phosphate group is achiral. However, replacement of one of the non-bridging oxygens with one of the above atoms or groups of atoms can render the phosphorous atom chiral. The stereogenic phosphorous atom can possess either the “R” configuration (herein Rp) or the “S” configuration (herein Sp). The backbone can also be modified by replacement of a bridging oxygen, (i.e., the oxygen that links the phosphate to the nucleoside), with nitrogen (bridged phosphoroamidates), sulfur (bridged phosphorothioates) and carbon (bridged methylenephosphonates). The replacement can occur at either linking oxygen or at both of the linking oxygens.

[0514] The phosphate group can be replaced by non-phosphorus containing connectors in certain backbone modifications, e.g., an amide linkage. In some embodiments, the charged phosphate group can be replaced by a neutral moiety. Examples of moieties which can replace the phosphate group can include, without limitation, e.g., methyl phosphonate, carboxymethyl, carbamate, amide, thioether. Further examples of moieties which can replace the phosphate group can include, without limitation, e.g., ethylene oxide linker, sulfonate, sulfonamide, thioformacetal, formacetal, methyleneimino, methylenemethylimino, methylenehydrazo, methylenedimethylhydrazo and methyleneoxymethylimino.

[0515] Scaffolds that can mimic nucleic acids can also be constructed wherein the phosphate linker and ribose sugar are replaced by nuclease resistant nucleoside or nucleotide surrogates. Such modifications may comprise backbone and sugar modifications. In some embodiments, the nucleobases can be tethered by a surrogate backbone. Examples can include, without limitation, the morpholino, cyclobutyl, pyrrolidine and peptide nucleic acid (PNA) nucleoside surrogates.

[0516] The modified nucleosides and modified nucleotides can include one or more modifications to the sugar group, i.e. at sugar modification. For example, the 2′ hydroxyl group (OH) can be modified, e.g. replaced with a number of different “oxy” or “deoxy” substituents. In some embodiments, modifications to the 2′ hydroxyl group can enhance the stability of the nucleic acid since the hydroxyl can no longer be deprotonated to form a 2′-alkoxide ion.

[0517] Examples of 2′ hydroxyl group modifications can include alkoxy or aryloxy (OR, wherein “R” can be, e.g., alkyl, cycloalkyl, aryl, aralkyl, heteroaryl or a sugar); polyethyleneglycols (PEG), O(CH₂CH₂O)ₙCH₂CH₂OR wherein R can be, e.g., H or optionally substituted alkyl, and n can be an integer from 0 to 20 (e.g., from 0 to 4, from 0 to 8, from 0 to 10, from 0 to 16, from 1 to 4, from 1 to 8, from 1 to 10, from 1 to 16, from 1 to 20, from 2 to 4, from 2 to 8, from 2 to 10, from 2 to 16, from 2 to 20, from 4 to 8, from 4 to 10, from 4 to 16, and from 4 to 20). In some embodiments, the 2′ hydroxyl group modification can be 2′-O-Me. In some embodiments, the 2′ hydroxyl group modification can be a 2′-fluoro modification, which replaces the 2′ hydroxyl group with a fluoride. In some embodiments, the 2′ hydroxyl group modification can include “locked” nucleic acids (LNA) in which the 2′ hydroxyl can be connected, e.g., by a C1-6 alkylene or C1-6 heteroalkylene bridge, to the 4′ carbon of the same ribose sugar, where exemplary bridges can include methylene, propylene, ether, or amino bridges; O-amino (wherein amino can be, e.g., NH₂; alkylamino, dialkylamino, heterocyclyl, arylamino, diarylamino, heteroarylamino, or diheteroarylamino, ethylenediamine, or polyamino) and aminoalkoxy, O(CH₂)ₙ-amino, (wherein amino can be, e.g., NH₂; alkylamino, dialkylamino, heterocyclyl, arylamino, diarylamino, heteroarylamino, or diheteroarylamino, ethylenediamine, or polyamino). In some embodiments, the 2′ hydroxyl group modification can include “unlocked” nucleic acids (UNA) in which the ribose ring lacks the C2′-C3′ bond. In some embodiments, the 2′ hydroxyl group modification can include the methoxyethyl group (MOE), (OCH₂CH₂OCH₃, e.g., a PEG derivative). 2′ modifications can include hydrogen (i.e. deoxyribose sugars); halo (e.g., bromo, chloro, fluoro, or iodo); amino (wherein amino can be, e.g., NH₂; alkylamino, dialkylamino, heterocyclyl, arylamino, diarylamino, heteroarylamino, diheteroarylamino, or amino acid); NH(CH₂CH₂NH)ₙCH₂CH₂— amino (wherein amino can be, e.g., as described herein), —NHC(O)R (wherein R can be, e.g., alkyl, cycloalkyl, aryl, aralkyl, heteroaryl or sugar), cyano; mercapto; alkyl-thio-alkyl; thioalkoxy; and alkyl, cycloalkyl, aryl, alkenyl and alkynyl, which may be optionally substituted with e.g., an amino as described herein.

[0518] The sugar modification can comprise a sugar group which may also contain one or more carbons that possess the opposite stereochemical configuration than that of the corresponding carbon in ribose. Thus, a modified nucleic acid can include nucleotides containing e.g., arabinose, as the sugar. The modified nucleic acids can also include abasic sugars. These abasic sugars can also be further modified at one or more of the constituent sugar atoms. The modified nucleic acids can also include one or more sugars that are in the L form, e.g., L-nucleosides. As used herein, a single abasic sugar is not understood to result in a discontinuity of a duplex.

[0519] In certain embodiments, 2′ modifications, include, for example, modifications include 2′-OMe, 2′-F, 2′-H, optionally 2′-O-Me.

[0520] The modified nucleosides and modified nucleotides described herein, which can be incorporated into a modified nucleic acid, can include a modified base, also called a nucleobase. Examples of nucleobases include, but are not limited to, adenine (A), guanine (G), cytosine (C), and uracil (U). These nucleobases can be modified or wholly replaced to provide modified residues that can be incorporated into modified nucleic acids. The nucleobase of the nucleotide can be independently selected from a purine, a pyrimidine, a purine analog, or pyrimidine analog. In some embodiments, the nucleobase can include, for example, naturally-occurring and synthetic derivatives of a base.

[0521] In embodiments employing a dual guide RNA, each of the crRNA and the tracr RNA can contain modifications. Such modifications may be at one or both ends of the crRNA or tracr RNA. In embodiments comprising an sgRNA, one or more residues at one or both ends of the sgRNA may be chemically modified, or internal nucleosides may be modified, or the sgRNA may be chemically modified throughout. Certain embodiments comprise a 5′ end modification. Certain embodiments comprise a 3′ end modification. Certain embodiments comprise a 5′ end modification and a 3′ end modification.

[0522] In some embodiments, the guide RNAs disclosed herein comprise one of the modification patterns disclosed in WO2018/107028, the contents of which are hereby incorporated by reference in their entirety. In some embodiments, the guide RNAs disclosed herein comprise one of the structures/modification patterns disclosed in US20170114334, the contents of which are hereby incorporated by reference in their entirety. In some embodiments, the guide RNAs disclosed herein comprise one of the structures/modification patterns disclosed in WO2017/136794, the contents of which are hereby incorporated by reference in their entirety. In some embodiments, the guide RNAs disclosed herein comprise one of the structures/modification patterns disclosed in WO2019/237069, the contents of which are hereby incorporated by reference in their entirety. In some embodiments, the guide RNAs disclosed herein comprise one of the structures/modification patterns disclosed in WO2021/119275, the contents of which are hereby incorporated by reference in their entirety. In some embodiments, the guide RNAs disclosed herein comprise one of the structures/modification patterns disclosed in PCT/US2022/079121, the contents of which are hereby incorporated by reference in their entirety. In some embodiments, the guide RNAs disclosed herein comprise one of the structures/modification patterns disclosed in WO2022/261292, the contents of which are hereby incorporated by reference in their entirety.

### VI. Delivery

[0523] The following section provides additional features of lipid-based delivery compositions, including lipid nanoparticles (LNPs) and lipoplexes, for the nucleic acid described herein or nucleic acids encoding polypeptide disclosed herein. In some embodiments, the nucleic acid or nucleic acids encoding the same is delivered to the cell via at least one lipid nanoparticle (LNP).

[0524] In some embodiments, LNP refers to lipid nanoparticles with a diameter of <100 nM, or a population of LNP with an average diameter of <100 nM. In certain embodiments, an LNP has a diameter of about 1-250 nm, about 10-200 nm, about 20-150 nm, about 50-150 nm, about 50-100 nm, about 50-120 nm, about 60-100 nm, about 75-150 nm, about 75-120 nm, or about 75-100 nm, or a population of the LNP with an average diameter of about 10-200 nm, about 20-150 nm, about 50-150 nm, about 50-100 nm, about 50-120 nm, about 60-100 nm, about 75-150 nm, about 75-120 nm, or about 75-100 nm. In preferred embodiments, an LNP composition has a diameter of 75-150 nm.

[0525] LNPs are formed by precise mixing a lipid component (e.g., in ethanol) with an aqueous nucleic acid component and LNPs are uniform in size. Lipoplexes are particles formed by bulk mixing the lipid and nucleic acid components and are between about 100 nm and 1 micron in size. In certain embodiments the lipid nucleic acid assemblies are LNPs. As used herein, a “lipid nucleic acid assembly” comprises a plurality of (i.e., more than one) lipid molecules physically associated with each other by intermolecular forces. A lipid nucleic acid assembly may comprise a bioavailable lipid having a pKa value of <7.5 or <7. The lipid nucleic acid assemblies are formed by mixing an aqueous nucleic acid-containing solution with an organic solvent-based lipid solution, e.g., 100% ethanol. Suitable solutions or solvents include or may contain: water, PBS, Tris buffer, NaCl, citrate buffer, ethanol, chloroform, diethylether, cyclohexane, tetrahydrofuran, methanol, isopropanol. A pharmaceutically acceptable buffer may optionally be comprised in a pharmaceutical formulation comprising the lipid nucleic acid assemblies, e.g., for an ex vivo ACT therapy. In some embodiments, the aqueous solution comprises an RNA, such as an mRNA or a gRNA. In some embodiments, the aqueous solution comprises an mRNA encoding an RNA-guided DNA binding agent, such as Cas9.

[0526] In some embodiments, the lipid nucleic acid assembly formulations include an “amine lipid” (sometimes herein or elsewhere described as an “ionizable lipid” or a “biodegradable lipid”), together with an optional “helper lipid”, a “neutral lipid”, and a stealth lipid such as a PEG lipid. In some embodiments, the amine lipids or ionizable lipids are cationic depending on the pH.

### A. Amine Lipids

[0527] In some embodiments, LNPs comprise an ionizable lipid such as Lipid A, or Lipid D or their equivalents, including acetal analogs of Lipid A or Lipid D.

[0528] In some embodiments, the ionizable lipid is Lipid A, which is (9Z,12Z)-3-((4,4-bis(octyloxy)butanoyl)oxy)-2-((((3-(diethylamino)propoxy)carbonyl)oxy)methyl)propyl octadeca-9,12-dienoate, also called 3-((4,4-bis(octyloxy)butanoyl)oxy)-2-((((3-(diethylamino)propoxy)carbonyl)oxy)methyl)propyl (9Z,12Z)-octadeca-9,12-dienoate. Lipid A can be depicted as:

[chemical structure]

[0529] Lipid A may be synthesized according to WO2015/095340 (e.g., pp. 84-86). In some embodiments, the amine lipid is Lipid A, or an amine lipid provided in WO2020/219876, which is hereby incorporated by reference.

[0530] In some embodiments, an ionizable lipid is an analog of Lipid A. In some embodiments, a Lipid A analog is an acetal analog of Lipid A. In particular LNPs, the acetal analog is a C₄-C₁₂ acetal analog. In some embodiments, the acetal analog is a C₅-C₁₂ acetal analog. In additional embodiments, the acetal analog is a C₅-C₁₀ acetal analog. In further embodiments, the acetal analog is chosen from a C₄, C₅, C₆, C₇, C₉, C₁₀, C₁₁, and C₁₂ acetal analog.

[0531] In some embodiments, the ionizable lipid is a compound having a structure of Formula IA

[chemical structure]

wherein
[0532] X^{1A} is O, NH, or a direct bond;
[0533] X^{2A} is C₂₋₃ alkylene;
[0534] R^{3A} is C₁₋₃ alkyl;
[0535] R^{2A} is C₁₋₃ alkyl, or
[0536] R^{2A} taken together with the nitrogen atom to which it is attached and 2-3 carbon atoms of X^{2A} form a 5- or 6-membered ring, or
[0537] R^{2A} taken together with R3A and the nitrogen atom to which they are attached form a 5-membered ring;
[0538] Y^{1A} is C₆₋₁₀ alkylene;
[0539] Y^{2A} is selected from

[chemical structure]

[0540] R^{4A} is C₄₋₁₁ alkyl;
[0541] Z^{1A} is C₂₋₅ alkylene;
[0542] Z^{2A} is

[chemical structure]

or absent;
[0543] R^{5A} is C₆₋₈ alkyl or C₆₋₈ alkoxy; and
[0544] R^{6A} is C₆₋₈ alkyl or C₆₋₈ alkoxy
[0545] or a salt thereof.

[0546] In some embodiments, the amine lipid is a compound of Formula (IIA)

[chemical structure]

wherein
[0547] X^{1A} is O, NH, or a direct bond;
[0548] X^{2A} is C₂₋₃ alkylene;
[0549] Z^{1A} is C₃ alkylene and R^{5A} and R^{6A} are each C₆ alkyl, or Z^{1A} is a direct bond and R^{5A} and R^{6A} are each C₈ alkoxy; and
[0550] R^{8A} is

[chemical structure]

[0551] or a salt thereof.

[0552] In certain embodiments, X^{1A} is O. In other embodiments, X^{1A} is NH. In still other embodiments, X^{1A} is a direct bond.

[0553] In certain embodiments, X^{1A} is C₃ alkylene. In particular embodiments, X^{2A} is C₂ alkylene.

[0554] In certain embodiments, Z1A is a direct bond and R^{5A} and R^{6A} are each C₈ alkoxy. In other embodiments, Z^{1A} is C₃ alkylene and R^{5A} and R^{6A} are each C₆ alkyl.

[0555] In certain embodiments, R^{8A} is

[chemical structure]

In other embodiments, R^{8A} is

[chemical structure]

[0556] In certain embodiments, the amine lipid is a salt.

[0557] Representative compounds of Formula (IA) include:

| Compound | |
|---|---|
| Number | Compound |
| 1A | [chemical structure] |
| 2A | [chemical structure] |
| 3A | [chemical structure] |
| 4A | [chemical structure] |
| 5A | [chemical structure] |
| 6A | [chemical structure] |
| 7A | [chemical structure] |
| 8A | [chemical structure] |
| 9A | [chemical structure] |
| 10A | [chemical structure] |
| 11A | [chemical structure] |
| 12A | [chemical structure] |
| 13A | [chemical structure] |
| 14A | [chemical structure] |
| 15A | [chemical structure] |
| 16A | [chemical structure] |
| 17A | [chemical structure] |
| 18A | [chemical structure] |
| 19A | [chemical structure] |

or a salt thereof, such as a pharmaceutically acceptable salt thereof.

[0558] In some embodiments, the amine lipid is Lipid D, which is nonyl 8-((7,7-bis(octyloxy)heptyl)(2-hydroxyethyl)amino)octanoate:

[chemical structure]

or a salt thereof.

[0559] Lipid D may be synthesized according to WO2020072605 and Mol. Ther. 2018, 26(6), 1509-1519 (“Sabnis”), which are incorporated by reference in their entireties. In some embodiments, the amine lipid Lipid D, or an amine lipid provided in WO2020072605, which is hereby incorporated by reference.

[0560] In some embodiments, the amine lipid is a compound having a structure of Formula IB.

[chemical structure]

wherein
[0561] X^{1B} is C₆₋₇ alkylene;
[0562] X^{2B} is

[chemical structure]

or absent, provided that if X^{2B} is

[chemical structure]

R^{2B} is not alkoxy;
[0563] Z^{1B} is C₂₋₃ alkylene;
[0564] Z^{2B} is selected from —OH, —NHC(═O)OCH₃, and —NHS(═O)₂CH₃;
[0565] R^{1B} is C₇₋₉ unbranched alkyl; and
[0566] each R^{2B} is independently C₈ alkyl or C₈ alkoxy;
[0567] or a salt thereof

[0568] In some embodiments, the amine lipid is a compound of Formula (IIB)

[chemical structure]

wherein
[0569] X^{1B} is C₆₋₇ alkylene;
[0570] Z^{1B} is C₂₋₃ alkylene;
[0571] R^{1B} is C₇₋₉ unbranched alkyl; and
[0572] each R^{2B} is C₈ alkyl;
[0573] or a salt thereof.

[0574] In certain embodiments, X^{1B} is C₆ alkylene. In other embodiments, X^{1B} is C₇ alkylene.

[0575] In certain embodiments, Z^{1B} is a direct bond and R^{5B} and R^{6B} are each C₈ alkoxy. In other embodiments, Z^{1B} is C₃ alkylene and R^{5B} and R^{6B} are each C₆ alkyl.

[0576] In certain embodiments, X^{2B} is

[chemical structure]

and R^{2B} is not alkoxy. In other embodiments, X^{2B} is absent.

[0577] In certain embodiments, Z^{1B} is C₂ alkylene; In other embodiments, Z^{1B} is C₃ alkylene.

[0578] In certain embodiments, Z^{2B} is —OH. In other embodiments, Z^{2B} is —NHC(═O)OCH₃. In other embodiments, Z^{2B} is —NHS(═O)₂CH₃.

[0579] In certain embodiments, R^{1B} is C₇ unbranched alkylene. In other embodiments, R^{1B} is C₈ branched or unbranched alkylene. In other embodiments, R^{1B} is C₉ branched or unbranched alkylene.

[0580] In certain embodiments, the amine lipid is a salt.

[0581] Representative compounds of Formula (IB) include:

| Compound | |
|---|---|
| Number | Compound |
| 1B | [chemical structure] |
| 2B | [chemical structure] |
| 3B | [chemical structure] |
| 4B | [chemical structure] |
| 5B | [chemical structure] |
| 6B | [chemical structure] |
| 7B | [chemical structure] |

or a salt thereof, such as a pharmaceutically acceptable salt thereof.

[0582] Amine lipids and other “biodegradable lipids” suitable for use in the lipid nucleic acid assemblies described herein are biodegradable in vivo or ex vivo. The amine lipids have low toxicity (e.g., are tolerated in animal models without adverse effect in amounts of greater than or equal to 10 mg/kg). In some embodiments, lipid nucleic acid assemblies comprising an amine lipid include those where at least 75% of the amine lipid is cleared from the plasma or the engineered cell within 8, 10, 12, 24, or 48 hours, or 3, 4, 5, 6, 7, or 10 days. In some embodiments, lipid nucleic acid assemblies comprising an amine lipid include those where at least 50% of the nucleic acid, e.g., mRNA or gRNA, is cleared from the plasma within 8, 10, 12, 24, or 48 hours, or 3, 4, 5, 6, 7, or 10 days. In some embodiments, lipid nucleic acid assemblies comprising an amine lipid include those where at least 50% of the lipid nucleic acid assembly is cleared from the plasma within 8, 10, 12, 24, or 48 hours, or 3, 4, 5, 6, 7, or 10 days, for example by measuring a lipid (e.g., an amine lipid), nucleic acid, e.g., RNA/mRNA, or other component. In some embodiments, lipid-encapsulated versus free lipid, RNA, or nucleic acid component of the lipid nucleic acid assembly is measured.

[0583] Biodegradable lipids include, for example the biodegradable lipids of WO 2020/219876 (e.g., at pp. 13-33, 66-87), WO 2020/118041, WO 2020/072605 (e.g., at pp. 5-12, 21-29, 61-68, WO 2019/067992, WO 2017/173054, WO 2015/095340, and WO 2014/136086, and LNPs include LNP compositions described therein, the lipids and compositions of which are hereby incorporated by reference.

[0584] Lipid clearance may be measured as described in literature. See Maier, M. A., et al. Biodegradable Lipids Enabling Rapidly Eliminated Lipid Nanoparticles for Systemic Delivery of RNAi Therapeutics. Mol. Ther. 2013, 21(8), 1570-78 (“Maier”). For example, in Maier, LNP-siRNA systems containing luciferases-targeting siRNA were administered to six- to eight-week old male C57Bl/6 mice at 0.3 mg/kg by intravenous bolus injection via the lateral tail vein. Blood, liver, and spleen samples were collected at 0.083, 0.25, 0.5, 1, 2, 4, 8, 24, 48, 96, and 168 hours post-dose. Mice were perfused with saline before tissue collection and blood samples were processed to obtain plasma. All samples were processed and analyzed by LC-MS. Further, Maier describes a procedure for assessing toxicity after administration of LNP-siRNA formulations. For example, a luciferase-targeting siRNA was administered at 0, 1, 3, 5, and 10 mg/kg (5 animals/group) via single intravenous bolus injection at a dose volume of 5 mL/kg to male Sprague-Dawley rats. After 24 hours, about 1 mL of blood was obtained from the jugular vein of conscious animals and the serum was isolated. At 72 hours post-dose, all animals were euthanized for necropsy. Assessments of clinical signs, body weight, serum chemistry, organ weights and histopathology were performed. Although Maier describes methods for assessing siRNA-LNP formulations, these methods may be applied to assess clearance, pharmacokinetics, and toxicity of administration of LNPs of the present disclosure.

[0585] Ionizable and bioavailable lipids for LNP delivery of nucleic acids known in the art are suitable. Lipids may be ionizable depending upon the pH of the medium they are in. For example, in a slightly acidic medium, the lipid, such as an amine lipid, may be protonated and thus bear a positive charge. Conversely, in a slightly basic medium, such as, for example, blood where pH is approximately 7.35, the lipid, such as an amine lipid, may not be protonated and thus bear no charge.

[0586] The ability of a lipid to bear a charge is related to its intrinsic pKa. In some embodiments, the amine lipids of the present disclosure may each, independently, have a pKa in the range of from about 5.1 to about 7.4. In some embodiments, the bioavailable lipids of the present disclosure may each, independently, have a pKa in the range of from about 5.1 to about 7.4, such as from about 5.5 to about 6.6, from about 5.6 to about 6.4, from about 5.8 to about 6.2, or from about 5.8 to about 6.5. For example, the amine lipids of the present disclosure may each, independently, have a pKa in the range of from about 5.8 to about 6.5. Lipids with a pKa ranging from about 5.1 to about 7.4 are effective for delivery of cargo in vivo, e.g., to the liver. Further, it has been found that lipids with a pKa ranging from about 5.3 to about 6.4 are effective for delivery in vivo, e.g., to tumors. See, e.g., WO2014/136086.

### B. Additional Lipids

[0587] “Neutral lipids” suitable for use in a lipid composition of the disclosure include, for example, a variety of neutral, uncharged or zwitterionic lipids. Examples of neutral phospholipids suitable for use in the present disclosure include, but are not limited to, 5-heptadecylbenzene-1,3-diol (resorcinol), dipalmitoylphosphatidylcholine (DPPC), distearoylphosphatidylcholine (DSPC), pohsphocholine (DOPC), dimyristoylphosphatidylcholine (DMPC), phosphatidylcholine (PLPC), 1,2-distearoyl-sn-glycero-3-phosphocholine (DAPC), phosphatidylethanolamine (PE), egg phosphatidylcholine (EPC), dilauryloylphosphatidylcholine (DLPC), dimyristoylphosphatidylcholine (DMPC), 1-myristoyl-2-palmitoyl phosphatidylcholine (MPPC), 1-palmitoyl-2-myristoyl phosphatidylcholine (PMPC), 1-palmitoyl-2-stearoyl phosphatidylcholine (PSPC), 1,2-diarachidoyl-sn-glycero-3-phosphocholine (DBPC), 1-stearoyl-2-palmitoyl phosphatidylcholine (SPPC), 1,2-dieicosenoyl-sn-glycero-3-phosphocholine (DEPC), palmitoyloleoyl phosphatidylcholine (POPC), lysophosphatidyl choline, dioleoyl phosphatidylethanolamine (DOPE), dilinoleoylphosphatidylcholine distearoylphosphatidylethanolamine (DSPE), dimyristoyl phosphatidylethanolamine (DMPE), dipalmitoyl phosphatidylethanolamine (DPPE), palmitoyloleoyl phosphatidylethanolamine (POPE), lysophosphatidylethanolamine and combinations thereof. In one embodiment, the neutral phospholipid may be selected from the group consisting of distearoylphosphatidylcholine (DSPC) and dimyristoyl phosphatidyl ethanolamine (DMPE). In another embodiment, the neutral phospholipid may be distearoylphosphatidylcholine (DSPC).

[0588] “Helper lipids” include steroids, sterols, and alkyl resorcinols. Helper lipids suitable for use in the present disclosure include, but are not limited to, cholesterol, 5-heptadecylresorcinol, and cholesterol hemisuccinate. In one embodiment, the helper lipid may be cholesterol. In one embodiment, the helper lipid may be cholesterol hemisuccinate.

[0589] “Stealth lipids” are lipids that alter the length of time the nanoparticles can exist in vivo (e.g., in the blood). Stealth lipids may assist in the formulation process by, for example, reducing particle aggregation and controlling particle size. Stealth lipids used herein may modulate pharmacokinetic properties of the lipid nucleic acid assembly or aid in stability of the nanoparticle ex vivo. Stealth lipids suitable for use in a lipid composition of the disclosure include, but are not limited to, stealth lipids having a hydrophilic head group linked to a lipid moiety. Stealth lipids suitable for use in a lipid composition of the present disclosure and information about the biochemistry of such lipids can be found in Romberg et al., Pharmaceutical Research, Vol. 25, No. 1, 2008, pg. 55-71 and Hoekstra et al., Biochimica et Biophysica Acta 1660 (2004) 41-52. Additional suitable PEG lipids are disclosed, e.g., in WO 2006/007712.

[0590] In one embodiment, the hydrophilic head group of stealth lipid comprises a polymer moiety selected from polymers based on PEG. Stealth lipids may comprise a lipid moiety. In some embodiments, the stealth lipid is a PEG lipid.

[0591] In one embodiment, a stealth lipid comprises a polymer moiety selected from polymers based on PEG (sometimes referred to as poly(ethylene oxide)), poly(oxazoline), poly(vinyl alcohol), poly(glycerol), poly(N-vinylpyrrolidone), polyaminoacids and poly[N-(2-hydroxypropyl)methacrylamide].

[0592] In one embodiment, the PEG lipid comprises a polymer moiety based on PEG (sometimes referred to as poly(ethylene oxide)).

[0593] The PEG lipid further comprises a lipid moiety. In some embodiments, the lipid moiety may be derived from diacylglycerol or diacylglycamide, including those comprising a dialkylglycerol or dialkylglycamide group having alkyl chain length independently comprising from about C4 to about C40 saturated or unsaturated carbon atoms, wherein the chain may comprise one or more functional groups such as, for example, an amide or ester. In some embodiments, the alkyl chain length comprises about C10 to C20. The dialkylglycerol or dialkylglycamide group can further comprise one or more substituted alkyl groups. The chain lengths may be symmetrical or asymmetrical.

[0594] Unless otherwise indicated, the term “PEG” as used herein means any polyethylene glycol or other polyalkylene ether polymer. In one embodiment, PEG is an optionally substituted linear or branched polymer of ethylene glycol or ethylene oxide. In one embodiment, PEG is unsubstituted. In one embodiment, the PEG is substituted, e.g., by one or more alkyl, alkoxy, acyl, hydroxy, or aryl groups. In one embodiment, the term includes PEG copolymers such as PEG-polyurethane or PEG-polypropylene (see, e.g., J. Milton Harris, Poly(ethylene glycol) chemistry: biotechnical and biomedical applications (1992)); in another embodiment, the term does not include PEG copolymers. In one embodiment, the PEG has a molecular weight of from about 130 to about 50,000, in a sub-embodiment, about 150 to about 30,000, in a sub-embodiment, about 150 to about 20,000, in a sub-embodiment about 150 to about 15,000, in a sub-embodiment, about 150 to about 10,000, in a sub-embodiment, about 150 to about 6,000, in a sub-embodiment, about 150 to about 5,000, in a sub-embodiment, about 150 to about 4,000, in a sub-embodiment, about 150 to about 3,000, in a sub-embodiment, about 300 to about 3,000, in a sub-embodiment, about 1,000 to about 3,000, and in a sub-embodiment, about 1,500 to about 2,500.

[0595] In some embodiments, the PEG (e.g., conjugated to a lipid moiety or lipid, such as a stealth lipid), is a “PEG-2K,” also termed “PEG 2000,” which has an average molecular weight of about 2,000 Daltons. PEG-2K is represented herein by the following formula (IV), wherein n is 45, meaning that the number averaged degree of polymerization comprises about 45 subunits

[chemical structure]

[0596] However, other PEG embodiments known in the art may be used, including, e.g., those where the number-averaged degree of polymerization comprises about 23 subunits (n=23), or 68 subunits (n=68). In some embodiments, n may range from about 30 to about 60. In some embodiments, n may range from about 35 to about 55. In some embodiments, n may range from about 40 to about 50. In some embodiments, n may range from about 42 to about 48. In some embodiments, n may be 45. In some embodiments, R may be selected from H, substituted alkyl, and unsubstituted alkyl. In some embodiments, R may be unsubstituted alkyl. In some embodiments, R may be methyl.

[0597] In any of the embodiments described herein, the PEG lipid may be selected from PEG-dilauroylglycerol, PEG-dimyristoylglycerol (PEG-DMG catalog #GM-020 from NOF, Tokyo, Japan), such as e.g., 1,2-dimyristoyl-rac-glycero-3-methylpolyoxyethylene glycol 2000 (PEG2k-DMG), PEG-dipalmitoylglycerol, PEG-distearoylglycerol (PEG-DSPE) (catalog #DSPE-020CN, NOF, Tokyo, Japan), PEG-dilaurylglycamide, PEG-dimyristylglycamide, PEG-dipalmitoylglycamide, and PEG-distearoylglycamide, PEG-cholesterol (1-[8′-(Cholest-5-en-3[beta]-oxy)carboxamido-3′,6′-dioxaoctanyl]carbamoyl-[omega]-methyl-poly(ethylene glycol), PEG-DMB (3,4-ditetradecoxylbenzyl-[omega]-methyl-poly(ethylene glycol)ether), 1,2-dimyristoyl-sn-glycero-3-phosphoethanolamine-N-[methoxy(polyethylene glycol)-2000](PEG2k-DMPE) (cat. #880150P from Avanti Polar Lipids, Alabaster, Alabama, USA), 1,2-distearoyl-sn-glycero-3-phosphoethanolamine-N-[methoxy(polyethylene glycol)-2000](PEG2k-DSPE) (cat. #880120C from Avanti Polar Lipids, Alabaster, Alabama, USA), 1,2-distearoyl-sn-glycerol, methoxypolyethylene glycol (PEG2k-DSG; GS-020, NOF Tokyo, Japan), poly(ethylene glycol)-2000-dimethacrylate (PEG2k-DMA), and 1,2-distearyloxypropyl-3-amine-N-[methoxy(polyethylene glycol)-2000](PEG2k-DSA). In one embodiment, the PEG lipid may be 1,2-dimyristoyl-rac-glycero-3-methylpolyoxyethylene glycol 2000. In one embodiment, the PEG lipid may be PEG2k-DMG. In some embodiments, the PEG lipid may be PEG2k-DSG. In one embodiment, the PEG lipid may be PEG2k-DSPE. In one embodiment, the PEG lipid may be PEG2k-DMA. In one embodiment, the PEG lipid may be PEG2k-C-DMA. In one embodiment, the PEG lipid may be compound S027, disclosed in WO2016/010840 (paragraphs [00240] to [00244]). In one embodiment, the PEG lipid may be PEG2k-DSA. In one embodiment, the PEG lipid may be PEG2k-C11. In some embodiments, the PEG lipid may be PEG2k-C14. In some embodiments, the PEG lipid may be PEG2k-C16. In some embodiments, the PEG lipid may be PEG2k-C18.

[0598] In some embodiments, the PEG lipid includes a glycerol group. In some embodiments, the PEG lipid includes a dimyristoylglycerol (DMG) group. In some embodiments, the PEG lipid comprises PEG-2k. In some embodiments, the PEG lipid is a PEG-DMG. In some embodiments, the PEG lipid is a PEG-2k-DMG. In some embodiments, the PEG lipid is 1,2-dimyristoyl-rac-glycero-3-methoxypolyethylene glycol2000. In some embodiments, the PEG-2k-DMG is 1,2-dimyristoyl-rac-glycero-3-methoxypolyethylene glycol-2000.

### C. Lipid Nanoparticles (LNPs)

[0599] The LNP may contain (i) a biodegradable lipid, (ii) an optional neutral lipid, (iii) a helper lipid, and (iv) a stealth lipid, such as a PEG lipid. The lipid nucleic acid assembly may contain a biodegradable lipid and one or more of a neutral lipid, a helper lipid, and a stealth lipid, such as a PEG lipid.

[0600] The lipid nucleic acid assembly may contain (i) an amine lipid for encapsulation and for endosomal escape, (ii) a neutral lipid for stabilization, (iii) a helper lipid, also for stabilization, and (iv) a stealth lipid, such as a PEG lipid. The lipid nucleic acid assembly may contain an amine lipid and one or more of a neutral lipid, a helper lipid, also for stabilization, and a stealth lipid, such as a PEG lipid.

[0601] An LNP may comprise a nucleic acid, e.g., an RNA, component that includes one or more of an RNA-guided DNA-binding agent, a Cas nuclease mRNA, a Class 2 Cas nuclease mRNA, a Cas9 mRNA, and a gRNA. In some embodiments, a LNP may include a Class 2 Cas nuclease and a gRNA as the RNA component. In some embodiments, an LNP may comprise the RNA component, an amine lipid, a helper lipid, a neutral lipid, and a stealth lipid. In certain LNPs, the helper lipid is cholesterol. In other compositions, the neutral lipid is DSPC. In additional embodiments, the stealth lipid is PEG2k-DMG or PEG2k-C11. In some embodiments, the LNP comprises Lipid A or an equivalent of Lipid A; a helper lipid; a neutral lipid; a stealth lipid; and an RNA such as a gRNA. In some embodiments, the LNP comprises Lipid A or an equivalent of Lipid A; a helper lipid; a stealth lipid; and an RNA such as a gRNA. In some compositions, the amine lipid is Lipid A. In some compositions, the amine lipid is Lipid A or an acetal analog thereof, the helper lipid is cholesterol; the neutral lipid is DSPC; and the stealth lipid is PEG2k-DMG.

[0602] In some embodiments, lipid compositions are described according to the respective molar ratios of the component lipids in the formulation. Embodiments of the present disclosure provide lipid compositions described according to the respective molar ratios of the component lipids in the formulation. In one embodiment, the mol % of the amine lipid may be from about 30 mol % to about 60 mol %. In one embodiment, the mol % of the amine lipid may be from about 40 mol % to about 60 mol %. In one embodiment, the mol % of the amine lipid may be from about 45 mol % to about 60 mol %. In one embodiment, the mol % of the amine lipid may be from about 50 mol % to about 60 mol %. In one embodiment, the mol % of the amine lipid may be from about 55 mol % to about 60 mol %. In one embodiment, the mol % of the amine lipid may be from about 50 mol % to about 55 mol %. In one embodiment, the mol % of the amine lipid may be about 50 mol %. In one embodiment, the mol % of the amine lipid may be about 55 mol %. In some embodiments, the amine lipid mol % of the lipid nucleic acid assembly batch will be ±30%, ±25%, ±20%, ±15%, ±10%, ±5%, or 2.5% of the target mol %. In some embodiments, the amine lipid mol % of the lipid nucleic acid assembly batch will be ±4 mol %, ±3 mol %, ±2 mol %, ±1.5 mol %, ±1 mol %, ±0.5 mol %, or ±0.25 mol % of the target mol %. All mol % numbers are given as a fraction of the lipid component of the LNPs. In some embodiments, lipid nucleic acid assembly inter-lot variability of the amine lipid mol % will be less than 15%, less than 10% or less than 5%.

[0603] In one embodiment, the mol % of the neutral lipid may be from about 5 mol % to about 15 mol %. In one embodiment, the mol % of the neutral lipid may be from about 7 mol % to about 12 mol %. In one embodiment, the mol % of the neutral lipid may be about 9 mol %. In some embodiments, the neutral lipid mol % of the lipid nucleic acid assembly batch will be ±30%, ±25%, ±20%, ±15%, ±10%, ±5%, or 2.5% of the target neutral lipid mol %. In some embodiments, lipid nucleic acid assembly inter-lot variability will be less than 15%, less than 10% or less than 5%.

[0604] In one embodiment, the mol % of the helper lipid may be from about 20 mol % to about 60 mol %. In one embodiment, the mol % of the helper lipid may be from about 25 mol % to about 55 mol %. In one embodiment, the mol % of the helper lipid may be from about 25 mol % to about 50 mol %. In one embodiment, the mol % of the helper lipid may be from about 25 mol % to about 40 mol %. In one embodiment, the mol % of the helper lipid may be from about 30 mol % to about 50 mol %. In one embodiment, the mol % of the helper lipid may be from about 30 mol % to about 40 mol %. In one embodiment, the mol % of the helper lipid is adjusted based on amine lipid, neutral lipid, and PEG lipid concentrations to bring the lipid component to 100 mol %. In some embodiments, the helper mol % of the lipid nucleic acid assembly batch will be ±30%, ±25%, ±20%, ±15%, ±10%, ±5%, or 2.5% of the target mol %. In some embodiments, lipid nucleic acid assembly inter-lot variability will be less than 15%, less than 10% or less than 5%.

[0605] In one embodiment, the mol % of the PEG lipid may be from about 1 mol % to about 10 mol %. In one embodiment, the mol % of the PEG lipid may be from about 2 mol % to about 10 mol %. In one embodiment, the mol % of the PEG lipid may be from about 1 mol % to about 3 mol %. In one embodiment, the mol % of the PEG lipid may be from about 2 mol % to about 4 mol %. In one embodiment, the mol % of the PEG lipid may be from about 1.5 mol % to about 2 mol %. In one embodiment, the mol % of the PEG lipid may be from about 2.5 mol % to about 4 mol %. In one embodiment, the mol % of the PEG lipid may be about 3 mol %. In one embodiment, the mol % of the PEG lipid may be about 2.5 mol %. In one embodiment, the mol % of the PEG lipid may be about 2 mol %. In one embodiment, the mol % of the PEG lipid may be about 1.5 mol %. In some embodiments, the PEG lipid mol % of the lipid nucleic acid assembly batch will be ±30%, ±25%, ±20%, ±15%, ±10%, ±5%, or ±2.5% of the target PEG lipid mol %. In some embodiments, LNP, e.g., the LNP composition, inter-lot variability will be less than 15%, less than 10% or less than 5%.

[0606] Embodiments of the present disclosure provide LNP compositions, for example, LNP compositions comprising an ionizable lipid (e.g., Lipid A or one of its analogs), a helper lipid, a helper lipid, and a PEG lipid, described according to the respective molar ratios of the component lipids in the formulation. In certain embodiments, the amount of the ionizable lipid is from about 25 mol % to about 45 mol %; the amount of the neutral lipid is from about 10 mol % to about 30 mol %; the amount of the helper lipid is from about 25 mol % to about 65 mol %; and the amount of the PEG lipid is from about 1.5 mol % to about 3.5 mol %. In certain embodiments, the amount of the ionizable lipid is from about 29-44 mol % of the lipid component; the amount of the neutral lipid is from about 11-28 mol % of the lipid component; the amount of the helper lipid is from about 28-55 mol % of the lipid component; and the amount of the PEG lipid is from about 2.3-3.5 mol % of the lipid component. In certain embodiments, the amount of the ionizable lipid is from about 29-38 mol % of the lipid component; the amount of the neutral lipid is from about 11-20 mol % of the lipid component; the amount of the helper lipid is from about 43-55 mol % of the lipid component; and the amount of the PEG lipid is from about 2.3-2.7 mol % of the lipid component. In certain embodiments, the amount of the ionizable lipid is from about 25-34 mol % of the lipid component; the amount of the neutral lipid is from about 10-20 mol % of the lipid component; the amount of the helper lipid is from about 45-65 mol % of the lipid component; and the amount of the PEG lipid is from about 2.5-3.5 mol % of the lipid component. In certain embodiments, the ionizable lipid is about 30-43 mol % of the lipid component; the amount of the neutral lipid is about 10-17 mol % of the lipid component; the amount of the helper lipid is about 43.5-56 mol % of the lipid component; and the amount of the PEG lipid is about 1.5-3 mol % of the lipid component. In certain embodiments, the ionizable lipid is about 33 mol % of the lipid component; the amount of the neutral lipid is about 15 mol % of the lipid component; the amount of the helper lipid is about 49 mol % of the lipid component; and the amount of the PEG lipid is about 3 mol % of the lipid component. In certain embodiments, the amount of the ionizable lipid is about 32.9 mol % of the lipid component; the amount of the neutral lipid is about 15.2 mol % of the lipid component; the amount of the helper lipid is about 49.2 mol % of the lipid component; and the amount of the PEG lipid is about 2.7 mol % of the lipid component.

[0607] In certain embodiments, the amount of the ionizable lipid (e.g., Lipid A or one of its analogs) is about 20-50 mol %, about 25-34 mol %, about 25-38 mol %, about 25-45 mol %, about 29-38 mol %, about 29-43 mol %, about 29-34 mol %, about 30-34 mol %, about 30-38 mol %, about 30-43 mol %, about 30-43 mol %, or about 33 mol %. In certain embodiments, the amount of the neutral lipid is about 10-30 mol %, about 11-30 mol %, about 11-20 mol %, about 13-17 mol %, or about 15 mol %. In certain embodiments, the amount of the helper lipid is about 35-50 mol %, about 35-65 mol %, about 35-55 mol %, about 38-50 mol %, about 38-55 mol %, about 38-65 mol %, about 40-50 mol %, about 40-65 mol %, about 43-65 mol %, about 43-55 mol %, or about 49 mol %. In certain embodiments, the amount of the PEG lipid is about 1.5-3.5 mol %, about 2.0-2.7 mol %, about 2.0-3.5 mol %, about 2.3-3.5 mol %, about 2.3-2.7 mol %, about 2.5-3.5 mol %, about 2.5-2.7 mol %, about 2.9-3.5 mol %, or about 2.7 mol %.

[0608] Other embodiments of the present disclosure provide LNP compositions, for example, LNP compositions comprising an ionizable lipid (e.g., Lipid D or one of its analogs), a helper lipid, a helper lipid, and a PEG lipid, described according to the respective molar ratios of the component lipids in the formulation. In certain embodiments, the amount of the ionizable lipid is from about 25 mol % to about 50 mol %; the amount of the neutral lipid is from about 7 mol % to about 25 mol %; the amount of the helper lipid is from about 39 mol % to about 65 mol %; and the amount of the PEG lipid is from about 0.5 mol % to about 1.8 mol %. In certain embodiments, the amount of the ionizable lipid is from about 27-40 mol % of the lipid component; the amount of the neutral lipid is from about 10-20 mol % of the lipid component; the amount of the helper lipid is from about 50-60 mol % of the lipid component; and the amount of the PEG lipid is from about 0.9-1.6 mol % of the lipid component. In certain embodiments, the amount of the ionizable lipid is from about 30-45 mol % of the lipid component; the amount of the neutral lipid is from about 10-15 mol % of the lipid component; the amount of the helper lipid is from about 39-59 mol % of the lipid component; and the amount of the PEG lipid is from about 1-1.5 mol % of the lipid component. In certain embodiments, the amount of the ionizable lipid is from about 30-45 mol % of the lipid component; the amount of the neutral lipid is from about 10-15 mol % of the lipid component; the amount of the helper lipid is from about 39-59 mol % of the lipid component; and the amount of the PEG lipid is from about 1-1.5 mol % of the lipid component. In certain embodiments, the ionizable lipid is about 30 mol % of the lipid component; the amount of the neutral lipid is about 10 mol % of the lipid component; the amount of the helper lipid is about 59 mol % of the lipid component; and the amount of the PEG lipid is about 1-1.5 mol % of the lipid component. In certain embodiments, the amount of the ionizable lipid is about 40 mol % of the lipid component; the amount of the neutral lipid is about 15 mol % of the lipid component; the amount of the helper lipid is about 43.5 mol % of the lipid component; and the amount of the PEG lipid is about 1.5 mol % of the lipid component. In certain embodiments, the amount of the ionizable lipid is about 50 mol % of the lipid component; the amount of the neutral lipid is about 10 mol % of the lipid component; the amount of the helper lipid is about 39 mol % of the lipid component; and the amount of the PEG lipid is about 1 mol % of the lipid component.

[0609] In certain embodiments, the amount of the ionizable lipid (e.g., Lipid D or one of its analogs) is about 20-55 mol %, about 20-45 mol %, about 20-40 mol %, about 27-40 mol %, about 27-45 mol %, about 27-55 mol %, about 30-40 mol %, about 30-45 mol %, about 30-55 mol %, about 30 mol %, about 40 mol %, or about 50 mol %. In certain embodiments, the amount of the neutral lipid is about 7-25 mol %, about 10-25 mol %, about 10-20 mol %, about 15-20 mol %, about 8-15 mol %, about 10-15 mol %, about 10 mol %, or about 15 mol %. In certain embodiments, the amount of the helper lipid is about 39-65 mol %, about 39-59 mol %, about 40-60 mol %, about 40-65 mol %, about 40-59 mol %, about 43-65 mol %, about 43-60 mol %, about 43-59 mol %, or about 50-65 mol %, about 50-59 mol %, about 59 mol %, or about 43.5 mol %. In certain embodiments, the amount of the PEG lipid is about 0.5-1.8 mol %, about 0.8-1.6 mol %, about 0.8-1.5 mol %, 0.9-1.8 mol %, about 0.9-1.6 mol %, about 0.9-1.5 mol %, 1-1.8 mol %, about 1-1.6 mol %, about 1-1.5 mol %, about 1 mol %, or about 1.5 mol %.

[0610] In some embodiments, the cargo includes an mRNA encoding an RNA-guided DNA-binding agent (e.g., a Cas nuclease, a Class 2 Cas nuclease, or Cas9), or a gRNA or a nucleic acid encoding a gRNA, or a combination of mRNA and gRNA. In one embodiment, a LNP may comprise a Lipid A or its equivalents, or an amine lipid as provided in WO2020219876; or Lipid D or an amine lipid provided in WO2020/072605. In some aspects, the amine lipid is Lipid A, or Lipid D. In some aspects, the amine lipid is a Lipid A equivalent, e.g. an analog of Lipid A, or an amine lipid provided in WO2020/219876. In certain aspects, the amine lipid is an acetal analog of Lipid A, optionally, an amine lipid provided in WO2020/219876. In some aspects, the amine lipid is a Lipid D or an amine lipid found in in W2020072605. In various embodiments, a LNP comprises an amine lipid, a neutral lipid, a helper lipid, and a PEG lipid. In some embodiments, the helper lipid is cholesterol. In some embodiments, the neutral lipid is DSPC. In specific embodiments, PEG lipid is PEG2k-DMG. In some embodiments, a LNP may comprise a Lipid A, a helper lipid, a neutral lipid, and a PEG lipid. In some embodiments, a LNP comprises an amine lipid, DSPC, cholesterol, and a PEG lipid. In some embodiments, the LNP comprises a PEG lipid comprising DMG. In some embodiments, the amine lipid is selected from Lipid A, and an equivalent of Lipid A, including an acetal analog of Lipid A, or an amine lipid provided in WO2020/219876; or Lipid D or an amine lipid provided in WO2020/072605. In additional embodiments, a LNP comprises Lipid A, cholesterol, DSPC, and PEG2k-DMG. In additional embodiments, a LNP comprises Lipid D, cholesterol, DSPC, and PEG2k-DMG.

[0611] Embodiments of the present disclosure also provide lipid compositions described according to the molar ratio between the positively charged amine groups of the amine lipid (N) and the negatively charged phosphate groups (P) of the nucleic acid to be encapsulated. This may be mathematically represented by the equation N/P. In some embodiments, a LNP may comprise a lipid component that comprises an amine lipid, a helper lipid, a neutral lipid, and a helper lipid; and a nucleic acid component, wherein the N/P ratio is about 3 to 10. In some embodiments, the LNPs comprise molar ratios of an amine lipid to RNA/DNA phosphate (N:P) of about 4.5, 5.0, 5.5, 6.0, or 6.5. In some embodiments, a LNP may comprise a lipid component that comprises an amine lipid, a helper lipid, a neutral lipid, and a helper lipid; and an RNA component, wherein the N/P ratio is about 3 to 10. In one embodiment, the N/P ratio may about 5-7. In one embodiment, the N/P ratio may about 4.5-8. In one embodiment, the N/P ratio may about 6. In one embodiment, the N/P ratio may be 6±1. In one embodiment, the N/P ratio may about 6±0.5. In some embodiments, the N/P ratio will be 30%, ±25%, ±20%, ±15%, ±10%, ±5%, or ±2.5% of the target N/P ratio. In some embodiments, lipid nucleic acid assembly inter-lot variability will be less than 15%, less than 10% or less than 5%.

[0612] In some embodiments, the lipid nucleic acid assembly comprises an RNA component, which may comprise an mRNA, such as an mRNA encoding a Cas nuclease. In one embodiment, RNA component may comprise a Cas9 mRNA. In some compositions comprising an mRNA encoding a Cas nuclease, the lipid nucleic acid assembly further comprises a gRNA nucleic acid, such as a gRNA. In some embodiments, the RNA component comprises a Cas nuclease mRNA and a gRNA. In some embodiments, the RNA component comprises a Class 2 Cas nuclease mRNA and a gRNA.

[0613] In some embodiments, a LNP may comprise an mRNA encoding a Cas nuclease such as a Class 2 Cas nuclease, an amine lipid, a helper lipid, a neutral lipid, and a PEG lipid. In certain LNPs comprising an mRNA encoding a Cas nuclease such as a Class 2 Cas nuclease, the helper lipid is cholesterol. In other compositions comprising an mRNA encoding a Cas nuclease such as a Class 2 Cas nuclease, the neutral lipid is DSPC. In additional embodiments comprising an mRNA encoding a Cas nuclease such as a Class 2 Cas nuclease, the PEG lipid is PEG2k-DMG or PEG2k-C11. In specific compositions comprising an mRNA encoding a Cas nuclease such as a Class 2 Cas nuclease, the amine lipid is selected from Lipid A and its equivalents, such as an acetal analog of Lipid A, or amine lipids provided in WO2020/219876; or Lipid D or amine lipids provided in WO2020/072605.

[0614] In some embodiments, an LNP may comprise a gRNA. In some embodiments, a LNP may comprise an amine lipid, a gRNA, a helper lipid, a neutral lipid, and a PEG lipid. In certain LNPs comprising a gRNA, the helper lipid is cholesterol. In some compositions comprising a gRNA, the neutral lipid is DSPC. In additional embodiments comprising a gRNA, the PEG lipid is PEG2k-DMG or PEG2k-C11. In some embodiments, the amine lipid is selected from Lipid A and its equivalents, such as an acetal analog of Lipid A, or amine lipids provided in WO2020/219876 and their equivalents; or Lipid D or amine lipids provided in WO2020/072605 and their equivalents.

[0615] In one embodiment, a LNP may comprise an sgRNA. In one embodiment, a LNP may comprise a Cas9 sgRNA. In one embodiment, a LNP may comprise a Cpf1 sgRNA. In some compositions comprising an sgRNA, the lipid nucleic acid assembly includes an amine lipid, a helper lipid, a neutral lipid, and a PEG lipid. In certain compositions comprising an sgRNA, the helper lipid is cholesterol. In other compositions comprising an sgRNA, the neutral lipid is DSPC. In additional embodiments comprising an sgRNA, the PEG lipid is PEG2k-DMG or PEG2k-C11. In some embodiments, the amine lipid is selected from Lipid A and its equivalents, such as acetal analogs of Lipid A, or amine lipids provided in WO2020/219876; or Lipid D or amine lipids provided in WO2020/072605.

[0616] In some embodiments, a LNP comprises an mRNA encoding a Cas nuclease and a gRNA, which may be an sgRNA. In one embodiment, a LNP may comprise an amine lipid, an mRNA encoding a Cas nuclease, a gRNA, a helper lipid, a neutral lipid, and a PEG lipid. In certain compositions comprising an mRNA encoding a Cas nuclease and a gRNA, the helper lipid is cholesterol. In some compositions comprising an mRNA encoding a Cas nuclease and a gRNA, the neutral lipid is DSPC. In additional embodiments comprising an mRNA encoding a Cas nuclease and a gRNA, the PEG lipid is PEG2k-DMG or PEG2k-C11. In some embodiments, the amine lipid is selected from Lipid A and its equivalents, such as acetal analogs of Lipid A, or amine lipids provided in WO2020/219876; or Lipid D or amine lipids provided in WO2020/072605.

[0617] In some embodiments, the LNPs include a Cas nuclease mRNA, such as a Class 2 Cas mRNA and at least one gRNA. In some embodiments, the LNP includes a ratio of gRNA to Cas nuclease mRNA, such as Class 2 Cas nuclease mRNA from about 25:1 to about 1:25 wt/wt. In some embodiments, the lipid nucleic acid assembly formulation includes a ratio of gRNA to Cas nuclease mRNA, such as Class 2 Cas nuclease mRNA from about 10:1 to about 1:10. In some embodiments, the lipid nucleic acid assembly formulation includes a ratio of gRNA to Cas nuclease mRNA, such as Class 2 Cas nuclease mRNA from about 8:1 to about 1:8. As measured herein, the ratios are by weight. In some embodiments, the lipid nucleic acid assembly formulation includes a ratio of gRNA to Cas nuclease mRNA, such as Class 2 Cas mRNA from about 5:1 to about 1:5. In some embodiments, ratio range is about 3:1 to 1:3, about 2:1 to 1:2, about 5:1 to 1:2, about 5:1 to 1:1, about 3:1 to 1:2, about 3:1 to 1:1, about 3:1, about 2:1 to 1:1. In some embodiments, the gRNA to mRNA ratio is about 3:1 or about 2:1. In some embodiments the ratio of gRNA to Cas nuclease mRNA, such as Class 2 Cas nuclease is about 1:1. In some embodiments the ratio of gRNA to Cas nuclease mRNA, such as Class 2 Cas nuclease is about 1:2. The ratio may be about 25:1, 10:1, 5:1, 3:1, 2:1, 1:1, 1:2, 1:3, 1:5, 1:10, or 1:25.

[0618] The LNPs disclosed herein may include a template nucleic acid. The template nucleic acid may be co-formulated with an mRNA encoding a Cas nuclease, such as a Class 2 Cas nuclease mRNA. In some embodiments, the template nucleic acid may be co-formulated with a guide RNA. In some embodiments, the template nucleic acid may be co-formulated with both an mRNA encoding a Cas nuclease and a guide RNA. In some embodiments, the template nucleic acid may be formulated separately from an mRNA encoding a Cas nuclease or a guide RNA. The template nucleic acid may be delivered with, or separately from the LNPs. In some embodiments, the template nucleic acid may be single- or double-stranded, depending on the desired repair mechanism. The template may have regions of homology to the target DNA, or to sequences adjacent to the target DNA.

[0619] In some embodiments, lipid nucleic acid assemblies are formed by mixing an aqueous RNA solution with an organic solvent-based lipid solution, e.g., 100% ethanol. Suitable solutions or solvents include or may contain: water, PBS, Tris buffer, NaCl, citrate buffer, ethanol, chloroform, diethylether, cyclohexane, tetrahydrofuran, methanol, isopropanol. A pharmaceutically acceptable buffer, e.g., for in vivo administration of lipid nucleic acid assemblies, may be used. In some embodiments, a buffer is used to maintain the pH of the composition comprising lipid nucleic acid assemblies at or above pH 6.5. In some embodiments, a buffer is used to maintain the pH of the composition comprising lipid nucleic acid assemblies at or above pH 7.0. In some embodiments, the composition has a pH ranging from about 7.2 to about 7.7. In additional embodiments, the composition has a pH ranging from about 7.3 to about 7.7 or ranging from about 7.4 to about 7.6. In further embodiments, the composition has a pH of about 7.2, 7.3, 7.4, 7.5, 7.6, or 7.7. The pH of a composition may be measured with a micro pH probe. In some embodiments, a cryoprotectant is included in the composition. Non-limiting examples of cryoprotectants include sucrose, trehalose, glycerol, DMSO, and ethylene glycol. Exemplary compositions may include up to 10% cryoprotectant, such as, for example, sucrose. In some embodiments, the LNP may include about 1, 2, 3, 4, 5, 6, 7, 8, 9, or 10% cryoprotectant. In some embodiments, the LNP may include about 1, 2, 3, 4, 5, 6, 7, 8, 9, or 10% sucrose. In some embodiments, the LNP may include a buffer. In some embodiments, the buffer may comprise a phosphate buffer (PBS), a Tris buffer, a citrate buffer, and mixtures thereof. In some exemplary embodiments, the buffer comprises NaCl. In some embodiments, NaCl is omitted. Exemplary amounts of NaCl may range from about 20 mM to about 45 mM. Exemplary amounts of NaCl may range from about 40 mM to about 50 mM. In some embodiments, the amount of NaCl is about 45 mM. In some embodiments, the buffer is a Tris buffer. Exemplary amounts of Tris may range from about 20 mM to about 60 mM. Exemplary amounts of Tris may range from about 40 mM to about 60 mM. In some embodiments, the amount of Tris is about 50 mM. In some embodiments, the buffer comprises NaCl and Tris. Certain exemplary embodiments of the LNPs contain 5% sucrose and 45 mM NaCl in Tris buffer. In other exemplary embodiments, compositions contain sucrose in an amount of about 5% w/v, about 45 mM NaCl, and about 50 mM Tris at pH 7.5. The salt, buffer, and cryoprotectant amounts may be varied such that the osmolality of the overall formulation is maintained. For example, the final osmolality may be maintained at less than 450 mOsm/L. In further embodiments, the osmolality is between 350 and 250 mOsm/L. Certain embodiments have a final osmolality of 300+/−20 mOsm/L.

[0620] In some embodiments, microfluidic mixing, T-mixing, or cross-mixing is used. In certain aspects, flow rates, junction size, junction geometry, junction shape, tube diameter, solutions, or RNA and lipid concentrations may be varied. Lipid nucleic acid assemblies or LNPs may be concentrated or purified, e.g., via dialysis, tangential flow filtration, or chromatography. The lipid nucleic acid assemblies may be stored as a suspension, an emulsion, or a lyophilized powder, for example. In some embodiments, a LNP is stored at 2-8° C., in certain aspects, the LNPs are stored at room temperature. In additional embodiments, a LNP is stored frozen, for example at −20° C. or −80° C. In other embodiments, a LNP is stored at a temperature ranging from about 0° C. to about −80° C. Frozen LNPs may be thawed before use, for example on ice, at 4° C., at room temperature, or at 25° C. Frozen LNPs may be maintained at various temperatures, for example on ice, at 4° C., at room temperature, at 25° C., or at 37° C.

[0621] In some embodiments, the concentration of the LNPs in the LNP composition is about 1-10 μg/mL, about 2-10 ug/mL, about 2.5-10 ug/mL, about 1-5 ug/mL, about 2-5 ug/mL, about 2.5-5 ug/mL, about 0.04 ug/mL, about 0.08 ug/mL, about 0.16 ug/mL, about 0.25 ug/mL, about 0.63 ug/mL, about 1.25 ug/mL, about 2.5 ug/mL, or about 5 μg/mL.

[0622] In some embodiments, the LNP comprises a stealth lipid, optionally wherein:
[0623] (i) the LNP comprises a lipid component and the lipid component comprises: about 50-60 mol % amine lipid such as Lipid A or Lipid D, about 8-10 mol % neutral lipid; and about 2.5-4 mol % stealth lipid (e.g., a PEG lipid), wherein the remainder of the lipid component is helper lipid, and wherein the N/P ratio of the LNP is about 6;
[0624] (ii) the LNP comprises about 50-60 mol % amine lipid such as Lipid A or Lipid D; about 27-39.5 mol % helper lipid; about 8-10 mol % neutral lipid; and about 2.5-4 mol % stealth lipid (e.g., a PEG lipid), wherein the N/P ratio of the LNP is about 5-7 (e.g., about 6);
[0625] (iii) the LNP comprises a lipid component and the lipid component comprises: about 50-60 mol % amine lipid such as Lipid A or Lipid D; about 5-15 mol % neutral lipid; and about 2.5-4 mol % stealth lipid (e.g., a PEG lipid), wherein the remainder of the lipid component is helper lipid, and wherein the N/P ratio of the LNP is about 3-10;
[0626] (iv) the LNP comprises a lipid component and the lipid component comprises: about 40-60 mol % amine lipid such as Lipid A or Lipid D; about 5-15 mol % neutral lipid; and about 2.5-4 mol % stealth lipid (e.g., a PEG lipid), wherein the remainder of the lipid component is helper lipid, and wherein the N/P ratio of the LNP is about 6;
[0627] (v) the LNP comprises a lipid component and the lipid component comprises: about 50-60 mol % amine lipid such as Lipid A or Lipid D; about 5-15 mol % neutral lipid; and about 1.5-10 mol % stealth lipid (e.g., a PEG lipid), wherein the remainder of the lipid component is helper lipid, and wherein the N/P ratio of the LNP is about 6;
[0628] (vi) the LNP comprises a lipid component and the lipid component comprises: about 40-60 mol % amine lipid such as Lipid A or Lipid D; about 0-10 mol % neutral lipid; and about 1.5-10 mol % stealth lipid (e.g., a PEG lipid), wherein the remainder of the lipid component is helper lipid, and wherein the N/P ratio of the LNP is about 3-10;
[0629] (vii) the LNP comprises a lipid component and the lipid component comprises: about 40-60 mol % amine lipid such as Lipid A or Lipid D; less than about 1 mol % neutral lipid; and about 1.5-10 mol % stealth lipid (e.g., a PEG lipid), wherein the remainder of the lipid component is helper lipid, and wherein the N/P ratio of the LNP is about 3-10;
[0630] (viii) the LNP comprises a lipid component and the lipid component comprises: about 40-60 mol % amine lipid such as Lipid A or Lipid D; and about 1.5-10 mol % stealth lipid (e.g., a PEG lipid), wherein the remainder of the lipid component is helper lipid, wherein the N/P ratio of the LNP composition is about 3-10, and wherein the LNP is essentially free of or free of neutral phospholipid; or
[0631] (ix) the LNP comprises a lipid component and the lipid component comprises: about 50-60 mol % amine lipid such as Lipid A or Lipid D; about 8-10 mol-% neutral lipid; and about 2.5-4 mol % stealth lipid (e.g., a PEG lipid), wherein the remainder of the lipid component is helper lipid, and wherein the N/P ratio of the LNP is about 3-7.

[0632] In some embodiments, the LNP comprises a lipid component and the lipid component comprises: about 50 mol % amine lipid such as Lipid A or Lipid D; about 9 mol % neutral lipid such as DSPC; about 3 mol % of stealth lipid such as a PEG lipid, such as PEG2k-DMG, and the remainder of the lipid component is helper lipid such as cholesterol wherein the N/P ratio of the LNP is about 6.

[0633] In some embodiments, the LNP comprises a lipid component and the lipid component comprises: about 50 mol % Lipid A; about 9 mol % DSPC; about 3 mol % of PEG2k-DMG, and the remainder of the lipid component is cholesterol wherein the N/P ratio of the LNP is about 6.

[0634] In some embodiments, the LNP comprises a lipid component and the lipid component comprises: about 35 mol % Lipid A; about 15 mol % neutral lipid; about 47.5 mol % helper lipid; and about 2.5 mol % stealth lipid (e.g., PEG lipid), and wherein the N/P ratio of the LNP composition is about 3-7.

[0635] In some embodiments, the LNP comprises a lipid component and the lipid component comprises: about 35 mol % Lipid D; about 15 mol % neutral lipid; about 47.5 mol % helper lipid; and about 2.5 mol % stealth lipid (e.g., PEG lipid), and wherein the N/P ratio of the LNP composition is about 3-7.

[0636] In some embodiments, the LNP comprises a lipid component and the lipid component comprises: about 25-45 mol % amine lipid, such as Lipid A; about 10-30 mol % neutral lipid; about 25-65 mol % helper lipid; and about 1.5-3.5 mol % stealth lipid (e.g., PEG lipid), and wherein the N/P ratio of the LNP composition is about 3-7.

[0637] In some embodiments, the LNP comprises a lipid component, wherein:
[0638] a. the amount of the amine lipid is about 29-44 mol % of the lipid component; the amount of the neutral lipid is about 11-28 mol % of the lipid component; the amount of the helper lipid is about 28-55 mol % of the lipid component; and the amount of the PEG lipid is about 2.3-3.5 mol % of the lipid component
[0639] b. the amount of the amine lipid is about 29-38 mol % of the lipid component; the amount of the neutral lipid is about 11-20 mol % of the lipid component; the amount of the helper lipid is about 43-55 mol % of the lipid component; and the amount of the PEG lipid is about 2.3-2.7 mol % of the lipid component;
[0640] c. the amount of the amine lipid is about 25-34 mol % of the lipid component; the amount of the neutral lipid is about 10-20 mol % of the lipid component; the amount of the helper lipid is about 45-65 mol % of the lipid component; and the amount of the PEG lipid is about 2.5-3.5 mol % of the lipid component; or
[0641] d. the amount of the amine lipid is about 30-43 mol % of the lipid component; the amount of the neutral lipid is about 10-17 mol % of the lipid component; the amount of the helper lipid is about 43.5-56 mol % of the lipid component; and the amount of the PEG lipid is about 1.5-3 mol % of the lipid component.

[0642] In some embodiments, the LNP comprises a lipid component and the lipid component comprises: about 25-50 mol % amine lipid, such as Lipid D; about 7-25 mol % neutral lipid; about 39-65 mol % helper lipid; and about 0.5-1.8 mol % stealth lipid (e.g., PEG lipid), and wherein the N/P ratio of the LNP composition is about 3-7.

[0643] In some embodiments, the LNP comprises a lipid component wherein the amount of the amine lipid is about 30-45 mol % of the lipid component; or about 30-40 mol % of the lipid component; optionally about 30 mol %, 40 mol %, or 50 mol % of the lipid component. In some embodiments, the LNP comprises a lipid component wherein the amount of the neutral lipid is about 10-20 mol % of the lipid component; or about 10-15 mol % of the lipid component; optionally about 10 mol % or 15 mol % of the lipid component. In some embodiments, the LNP comprises a lipid component wherein the amount of the helper lipid is about 50-60 mol % of the lipid component; about 39-59 mol % of the lipid component; or about 43.5-59 mol % of the lipid component; optionally about 59 mol % of the lipid component; about 43.5 mol % of the lipid component; or about 39 mol % of the lipid component. In some embodiments, the LNP comprises a lipid component wherein the amount of the PEG lipid is about 0.9-1.6 mol % of the lipid component; or about 1-1.5 mol % of the lipid component; optionally about 1 mol % of the lipid component or about 1.5 mol % of the lipid component

[0644] In some embodiments, the LNP comprises a lipid component, wherein:
[0645] a. the amount of the ionizable lipid is about 27-40 mol % of the lipid component; the amount of the neutral lipid is about 10-20 mol % of the lipid component; the amount of the helper lipid is about 50-60 mol % of the lipid component; and the amount of the PEG lipid is about 0.9-1.6 mol % of the lipid component;
[0646] b. the amount of the ionizable lipid is from about 30-45 mol % of the lipid component; the amount of the neutral lipid is from about 10-15 mol % of the lipid component; the amount of the helper lipid is from about 39-59 mol % of the lipid component; and the amount of the PEG lipid is from about 1-1.5 mol % of the lipid component;
[0647] c. the amount of the ionizable lipid is about 30 mol % of the lipid component; the amount of the neutral lipid is about 10 mol % of the lipid component; the amount of the helper lipid is about 59 mol % of the lipid component; and the amount of the PEG lipid is about 1-1.5 mol % of the lipid component;
[0648] d. the amount of the ionizable lipid is about 40 mol % of the lipid component; the amount of the neutral lipid is about 15 mol % of the lipid component; the amount of the helper lipid is about 43.5 mol % of the lipid component; and the amount of the PEG lipid is about 1.5 mol % of the lipid component; or
[0649] e. the amount of the ionizable lipid is about 50 mol % of the lipid component; the amount of the neutral lipid is about 10 mol % of the lipid component; the amount of the helper lipid is about 39 mol % of the lipid component; and the amount of the PEG lipid is about 1 mol % of the lipid component.

[0650] In some embodiments, the LNP has a diameter of about 1-250 nm, 10-200 nm, about 20-150 nm, about 50-150 nm, about 50-100 nm, about 50-120 nm, about 60-100 nm, about 75-150 nm, about 75-120 nm, or about 75-100 nm. In some embodiments, the LNP has a diameter of less than 100 nm. In some embodiments, the LNP composition comprises a population of the LNP with an average diameter of about 10-200 nm, about 20-150 nm, about 50-150 nm, about 50-100 nm, about 50-120 nm, about 60-100 nm, about 75-150 nm, about 75-120 nm, or about 75-100 nm. In some embodiments, the LNP has an average diameter of less than 100 nm.

[0651] In some embodiments, the LNP comprises: about 40-60 mol-% amine lipid; about 5-15 mol-% neutral lipid; and about 1.5-10 mol-% PEG lipid, wherein the remainder of the lipid component is helper lipid, and wherein the N/P ratio of the LNP composition is about 3-10. In some embodiments, the LNP comprises: about 50-60 mol-% amine lipid; about 8-10 mol-% neutral lipid; and about 2.5-4 mol-% PEG lipid, wherein the remainder of the lipid component is helper lipid, and wherein the N/P ratio of the LNP composition is about 3-8. In some embodiments, the LNP comprises: about 50-60 mol-% amine lipid; about 5-15 mol-% DSPC; and about 2.5-4 mol-% PEG lipid, wherein the remainder of the lipid component is cholesterol, and wherein the N/P ratio of the LNP composition is 3-8±0.2.

[0652] In embodiments, the average diameter is a Z-average diameter. In certain embodiments, the Z-average diameter is measured by dynamic light scattering (DLS) using methods known in the art. For example, average particle size and polydispersity can be measured by dynamic light scattering (DLS) using a Malvern Zetasizer DLS instrument. LNP samples are diluted with PBS buffer prior to being measured by DLS. Z-average diameter and number average diameter along with a polydispersity index (pdi) can be determined. The Z average is the intensity weighted mean hydrodynamic size of the ensemble collection of particles. The number average is the particle number weighted mean hydrodynamic size of the ensemble collection of particles. A Malvern Zetasizer instrument can also be used to measure the zeta potential of the LNP using methods known in the art.

### D. Targeted LNPs

[0653] In certain embodiments, the LNP disclosed herein is a LNP that is capable of delivering diverse cargoes to a cell or cell population, e.g., a tissue or organ, of interest (herein referred to as a “targeted LNP”). Targeted LNPs may utilize various active targeting (governed by interactions between a targeting domain attached to the targeted LNP, for example by a chemical means, and targets associated with a cell or cell population), passive targeting (governed primarily by LNP size and charge), and endogenous targeting mechanisms. Accordingly, in some embodiments, the targeted LNP comprises one or more targeting domains that targets the LNP to the specific cell or cell population. Targeting domains of the present disclosure include, but are not limited to, antibodies, antibody fragments, proteins, peptides, and nucleic acids. Alternatively or additionally, in certain embodiments, the targeted LNP comprises one or more targeting lipid components. In some embodiments, the targeted LNP is targeted to one or more of brain, eye, muscle, liver, lung, spleen, and bone marrow. Such LNPs are further described in, e.g., Akinc, A., et al. Mol Ther. 2010 (July), 18(7), 1357-1364; Cheng, Q., et al. Nat. Nanotechnol. 2020 (April), 15(4), 313-320; Herrara-Barrera, M., et al. Sci. Adv. 9, eadd4623(2023); Kasiewicz, L. N., et al. Lipid nanoparticles incorporating a GalNAc ligand enable in vivo liver ANGPTL3 editing in wild-type and somatic LDLR knockout non-human primates. BioRXiv. 2021, 11.08.467731; Kularatne, R. N., et al. Pharmaceuticals. 2022, 15, 897; Li, Q., et al. ACS Chem Biol. 2020 (April), 15(4), 830-836; Sago, C. D., et al. J Am Chem Soc. 2018 (December), 140(49), 17095-17105; Tombacz, I., et al. Mol Ther. 2021 (November), 29(11), 3293-3304; Veiga, N., et al. Nat Commun. 2018, 9, 4493; Wang, X., et al. Nat. Protoc. 2023 (January), 18(1): 265-291; WO 2022/232514, WO2022204219, WO2022140252, the contents of each of which are herein incorporated by reference. Targeted LNPs include, but are not limited to, selective organ targeting (SORT) LNPs as described in Cheng, Q., et al., 2020. Nat. Nanotechnol. 2020 (April), 15(4), 313-320.

[0654] In certain embodiments, the targeted LNP comprises one or more targeting domains that targets the LNP to the specific cell or cell population. The targeting domain may comprise a nucleic acid, peptide, antibody, small molecule, glycan, sugar, hormone, and the like that targets the LNP to the cell or cell population. In certain embodiments, the LNP is capable of multivalent targeting, wherein the LNP comprises multiple targeting mechanisms described herein. In certain embodiments, the targeting domain of the LNP specifically binds to a target associated with a cell or cell population in need of cargo associated with the LNP composition disclosed herein. For example, the targeting domain may be chosen to recognize a ligand that acts as a cell surface marker on target cells or cell populations associated with a particular disease state. Such a target can be a protein, protein fragment, antigen, or other biomolecule that is associated with the targeted cell or cell population. In some embodiments, the targeting domain is an affinity ligand which specifically binds to a target. In certain embodiments, the target (e.g., an antigen) is associated with a cell or cell population in need of a treatment with the cargo associated with the LNP. In some embodiments, the targeting domain may be co-polymerized with the composition comprising the LNP. In some embodiments, the targeting domain may be covalently attached to the composition comprising the LNP, such as through a chemical reaction between the targeting domain and the LNP.

### 1. Peptide Targeting Domains

[0655] In one embodiment, the targeting domain of the disclosure comprises a peptide. In certain embodiments, the peptide targeting domain specifically binds to a target, e.g., on a cell or cell population of interest.

[0656] The peptide of the present disclosure may be made using chemical methods. For example, peptides can be synthesized by solid phase techniques (Roberge J Y et al (1995) Science 269: 202-204), cleaved from the resin, and purified by preparative high performance liquid chromatography. Automated synthesis may be achieved, for example, using the ABI 431 A Peptide Synthesizer (Perkin Elmer) in accordance with the instructions provided by the manufacturer.

[0657] The peptide may alternatively be made by recombinant means or by cleavage from a longer polypeptide. The composition of a peptide may be confirmed by amino acid analysis or sequencing.

[0658] The peptides of the disclosure may include unnatural amino acids formed by post-translational modification or by introducing unnatural amino acids during translation.

### 2. Nucleic Acid Targeting Domains

[0659] In one embodiment, the targeting domain of the disclosure comprises an isolated nucleic acid, including for example a DNA and an RNA. In certain embodiments, the nucleic acid targeting domain specifically binds to a target, e.g., on a cell or cell population of interest. For example, in one embodiment, the nucleic acid comprises a nucleotide sequence that specifically binds to a target of interest.

[0660] The nucleotide sequences of a nucleic acid targeting domain can alternatively comprise sequence variations with respect to the original nucleotide sequences, for example, substitutions, insertions and/or deletions of one or more nucleotides, with the condition that the resulting nucleic acid functions as the original and specifically binds to the target of interest.

### 3. Antibodies

[0661] In one embodiment, the targeting domain of the disclosure comprises an antibody, or antibody fragment. In certain embodiments, the antibody targeting domain specifically binds to a target, e.g., on a cell or cell population of interest. Such antibodies include polyclonal antibodies, monoclonal antibodies, Fab and single chain Fv (scFv) fragments thereof, VHH domains thereof, nanobodies, bispecific antibodies, heteroconjugates, human and humanized antibodies. The antibodies may be intact monoclonal or polyclonal antibodies, and immunologically active fragments (e.g., a Fab or (Fab)2 fragment), an antibody heavy chain, an antibody light chain, humanized antibodies, a genetically engineered single chain Fv molecule (Ladner et al, U.S. Pat. No. 4,946,778), or a chimeric antibody, for example, an antibody which contains the binding specificity of a murine antibody, but in which the remaining portions are of human origin. Antibodies including monoclonal and polyclonal antibodies, fragments and chimeras, may be prepared using methods known to those skilled in the art.

[0662] Such antibodies may be produced in a variety of ways, including hybridoma cultures, recombinant expression in bacteria or mammalian cell cultures, and recombinant expression in transgenic animals. The choice of manufacturing methodology depends on several factors including the antibody structure desired, the importance of carbohydrate moieties on the antibodies, ease of culturing and purification, and cost. Many different antibody structures may be generated using standard expression technology, including full-length antibodies, antibody fragments, such as Fab and Fv fragments, as well as chimeric antibodies comprising components from different species. Antibody fragments of small size, such as Fab and Fv fragments, having no effector functions and limited pharmacokinetic activity may be generated in a bacterial expression system. Single chain Fv fragments show low immunogenicity.

[0663] In certain embodiments, the targeted LNP comprises a targeting lipid component. The LNPs disclosed herein may comprise a biodegradable lipid (i.e., an amine lipid or ionizable lipid), a neutral lipid, a helper lipid (e.g., cholesterol), and a stealth lipid (e.g., a PEG lipid). In some embodiments, wherein the LNP is a targeted LNP disclosed herein, the targeted LNP may comprise a biodegradable lipid, a neutral lipid, a helper lipid, and a stealth lipid, and further comprise a targeting lipid component that may result in alterations to LNP size or charge. This, in turn, may impact LNP uptake by different cells, cell populations, tissue types, and organ systems. For example, LNPs larger than 200 nm exhibit reduced hepatocyte targeting, likely because they are unable to fit through the comparatively narrower (˜100 nm) sinusoidal fenestration pores (Kularatne, R. N., et al. The Future of Tissue-Targeted Lipid Nanoparticle-Mediated Nucleic Acid Delivery. Pharmaceuticals. 2022, 15, 897. See also Wang, X., et al. Preparation of Selective Organ-Targeting (SORT) Lipid Nanoparticles (LNPs) Using Multiple Technical Methods for Tissue-Specific mRNA Delivery. Nat. Protoc. 2023 (January), 18(1): 265-291). Suitable ratios for the targeting lipid component relative to other components of the LNP may be prepared within the common knowledge in the art, for example, Cheng, et al., 2020. Nat. Nanotechnol. 2020 (April), 15(4), 313-320.

[0664] In some embodiments, the targeting lipid component is a permanently cationic lipid, an anionic lipid, a zwitterionic lipid, or an ionizable cationic lipid. In some embodiments, the permanently cationic lipid is 1,2-dioleoyl-3-trimethylammonium-propane (DOTAP), dimethyldioctadecylammonium (DDAB), or 1,2-dimyristoyl-sn-glycero-3-ethylphosphocholine (EPC). In some embodiments, the anionic lipid is 1,2-dimyristoyl-sn-glycero-3-phosphate (14PA) or sn-(3-oleoyl-2-hydroxy)-glycerol-1-phospho-sn-3′-(1′,2′-dioleoyl)-glycerol (18BMP). In some embodiments, the zwitterionic lipid is 2-((2,3-bis(oleoyloxy)propyl)dimethylammonio)ethyl ethyl phosphate (DOCPe) or 1,2-distearoyl-sn-glycero-3-phosphocholine (DPSC). In some embodiments, the ionizable cationic lipid is 1,2-dioleoyl-3-dimethylammonium-propane (DODAP) or C12-200.

[0665] In certain embodiments, the targeted LNP is targeted to one or more cell populations or tissues (e.g., brain, eye, muscle, liver, lung, spleen, bone marrow).

[0666] In some embodiments, the LNP is targeted to the brain. Exemplary cell or cell populations of interest include, but are not limited to, an astrocyte, an oligodendrocyte, an endothelial cell, a microglial cell, an ependymal cell, or a neuron.

[0667] In some embodiments, wherein the targeted LNP is targeted to the brain, the targeted LNP comprises a targeting lipid component. In some embodiments, wherein the targeted LNP is targeted to the brain, the targeted LNP comprises a targeting domain.

[0668] In some embodiments, the targeted LNP is targeted to the lung. In some embodiments, wherein the targeted LNP is targeted to the lung, the cell or cell population of interest comprises an airway epithelial cell such as a goblet cell, a ciliated cell, a clara cell, a neuroendocrine cell, a basal cell, an intermediate or parabasal cell, a serous cell, a brush cell, an oncocyte, a nonciliated columnar cell, or a metaplastic cell; an alveolar cell such as a type 1 or type 2 pneumocyte, or a cuboidal nonciliated cell; a bronchial salivary gland cell such as a serous cell, a mucous cell, or a ductal cell; an interstitial connective tissue cell such as a smooth muscle cell, a cartilage cell, a fibroblast, a myofibroblast, a meningothelioid cell of the minute meningothelioid nodules, an adipose cell, or a neural cell of the intrapulmonary nerves; a blood vessel-associated cell such as an endothelial cell, a smooth muscle cell, a fibroblast or myofibroblast, or a pericyte; a hematopoietic or lymphoid cell such as a lymphocyte, plasma cell, cell of the bronchial mucosal associated lymphoid tissue, megakaryocyte, macrophage, Langerhans cell, mast cell, eosinophil, neutrophil, or basophil; a pleural cell such as a mesothelial cell, a pleuripotent submesothelial fibroblast, an adipose cell of the intrapleural fat, an endothelial cell, a smooth muscle cell, or a fibroblast or myofibroblast; a stem cell; a perivascular epithelioid cell; a pluripotent epithelial stem cell; a meningothelioid cell; an endothelial progenitor cell; or a mucinous cell.

[0669] In some embodiments, wherein the targeted LNP is targeted to the lung, the targeted LNP comprises a targeting lipid component. In some embodiments, the targeting lipid component is a permanently cationic lipid such as 1,2-dioleoyl-3-trimethylammonium-propane (DOTAP), DDAB, or EPC. In some embodiments, wherein the targeted LNP is targeted to the lung, the targeted LNP comprises a targeting domain. In some embodiments, the targeting domain is Fab-C4, plasmalemma vesicle-associated protein (PV-1), or anti PECAM-1 antibody.

[0670] In some embodiments, the Targeted LNP is targeted to the spleen. In some embodiments, wherein the targeted LNP is targeted to the spleen, the cell or cell population of interest comprises a red pulp cell such as a fibroblast, reticular cell, macrophage, erythrocyte, granulocyte, circulating mononuclear cell, lymphocyte, hematopoietic cell, plasma cell, plasmablast, endothelial cell, erythroid cell, myeloid cell, megakaryocyte, or melanocyte; a white pulp cell such as a lymphocyte, macrophage, dendritic cell, plasma cell, reticular cell, or stromal cell; or a marginal zone cell such as a macrophage, an endothelial cell, a reticular fibroblast, dendritic cell, or lymphocyte; or a lymphoid-tissue inducer cell.

[0671] In some embodiments, wherein the targeted LNP is targeted to the spleen, the targeted LNP comprises a targeting lipid component. In some embodiments, the targeting lipid component is a negatively charged 1,2-dioleoyl-sn-glycero-3-phosphate (18PA). In some embodiments, the targeting lipid component is an anionic lipid such as 1,2-dimyristoyl-sn-glycero-3-phosphate (14PA) or sn-(3-oleoyl-2-hydroxy)-glycerol-1-phospho-sn-3′-(1′,2′-dioleoyl)-glycerol (18BMP). In some embodiments, the targeting lipid component is a zwitterionic lipid such as DOCPe or DSPC. In some embodiments, wherein the targeted LNP is targeted to the spleen, the targeted LNP comprises a targeting domain.

[0672] In some embodiments, the targeted LNP is targeted to the bone marrow. In some embodiments, wherein the targeted LNP is targeted to the bone marrow, the targeted LNP comprises a reticular cell, a periarteriolar cell, a Schwann cell, an osteoclast, an N-cadherin+ cell, an osteoblast, a megakaryocyte, an erythroblast, a hematopoietic stem cell, a granulocyte monocyte progenitor cell, an erythroid progenitor cell, a lympohoid progenitor cell, or a multipotent progenitor cell.

[0673] In some embodiments, wherein the targeted LNP is targeted to the bone marrow, the targeted LNP comprises a targeting lipid component. In some embodiments, wherein the targeted LNP is targeted to the bone marrow, the targeted LNP comprises a targeting domain. In some embodiments, wherein the targeted LNP is targeted to the bone marrow, the targeting domain is specific for a target selected from CD34, CD117, CD133, CD105, ABCG2, Bone morphogenetic protein receptor (BMPR), CD44, Sca-1, Thy-1, CD 133, alkaline phosphatase, and alpha-fetoprotein. In some embodiments, wherein the targeted LNP is targeted to the bone marrow, the targeted LNP comprises anti-CD29.

[0674] In some embodiments, the targeted LNP comprises a polynucleotide comprising an open reading frame (ORF) encoding a fusion protein, wherein the fusion protein comprises a first cleavase and a second cleavase, wherein: (i) the first cleavase is an S. pyogenes (Spy)Cas9 cleavase, said SpyCas9 cleavase comprising a R1333K mutation within its protospacer adjacent motif recognition domain; and (ii) the second cleavase is an N. meningitidis (Nme)Cas9 cleavase, a C. jejuni (Cje)Cas9 cleavase, or an S. muelleri (Smu) Cas9 cleavase. In some embodiments, the targeted LNP may further comprise a first guide RNA that directs the first cleavase to a first genomic locus; and a second guide RNA that directs the second cleavase to a second genomic locus, wherein the second genomic locus is different from the first genomic locus. In some embodiments, a targeted LNP may comprise the ORF encoding the fusion protein, the first guide RNA, the second guide RNA, an amine lipid, a helper lipid, a neutral lipid, a stealth lipid, and a targeting domain disclosed herein. In some embodiments, the targeted LNP is targeted to the lung, spleen, or bone marrow.

[0675] In some embodiments, the Targeted LNP comprises (a) a polynucleotide comprising an open reading frame (ORF) encoding a fusion protein, wherein the fusion protein comprises a first cleavase and a second cleavase; (b) a first guide RNA that directs the first cleavase to a first genomic locus; and (c) a second guide RNA that directs the second cleavase to a second genomic locus, wherein the second genomic locus is different from the first genomic locus. In some embodiments, a targeted LNP may comprise (a)-(c), an amine lipid, a helper lipid, a neutral lipid, a stealth lipid, and a targeting lipid component disclosed herein. In some embodiments, a targeted LNP may comprise (a)-(c), an amine lipid, a helper lipid, a neutral lipid, a stealth lipid, and a targeting domain disclosed herein. In some embodiments, the targeted LNP is targeted to the lung, spleen, or bone marrow.

[0676] In some embodiments, the targeted LNP comprises a polynucleotide comprising an open reading frame (ORF) encoding (a) a fusion protein, wherein the fusion protein comprises a first cleavase and a second cleavase, wherein: (i) the first cleavase is an S. pyogenes (Spy)Cas9 cleavase, said SpyCas9 cleavase comprising a R1333K mutation within its protospacer adjacent motif recognition domain; and (ii) the second cleavase is an N. meningitidis (Nme)Cas9 cleavase, a C. jejuni (Cje)Cas9 cleavase, or an S. muelleri (Smu) Cas9 cleavase; and (b) a first guide RNA that directs the first cleavase to a first genomic locus; and (c) a second guide RNA that directs the second cleavase to a second genomic locus, wherein the second genomic locus is different from the first genomic locus. some embodiments, a targeted LNP may comprise (a)-(c), an amine lipid, a helper lipid, a neutral lipid, a stealth lipid, and a targeting lipid component disclosed herein. In some embodiments, a targeted LNP may comprise (a)-(c), an amine lipid, a helper lipid, a neutral lipid, a stealth lipid, and a targeting domain disclosed herein. In some embodiments, the targeted LNP is targeted to the lung, spleen, or bone marrow.

[0677] In some embodiments, the targeted LNP comprises (a) a first polypeptide comprising an ORF encoding the first polypeptide, wherein the first polypeptide comprises a first cleavase and a first intein, wherein the first cleavase is an S. pyogenes (Spy)Cas9 cleavase, said SpyCas9 cleavase comprising a R1333K mutation within its protospacer adjacent motif recognition domain; (b) a second polynucleotide comprising an ORF encoding the second polypeptide, wherein the second polypeptide comprises a second cleavase and a second intein capable of binding to the first intein, wherein the second cleavase is an N. meningitidis (Nme)Cas9 cleavase, a C. jejuni (Cje)Cas9 cleavase, or a Simonsiella muelleri (Smu)Cas9 cleavase, and wherein the first polypeptide binds to the second polypeptide through intein catalysis. In some embodiments, the targeted LNP may further comprise a first guide RNA that directs the first cleavase to a first genomic locus; and a second guide RNA that directs the second cleavase to a second genomic locus, wherein the second genomic locus is different from the first genomic locus. In some embodiments, a targeted LNP may comprise the ORF encoding the fusion protein, the first guide RNA, the second guide RNA, an amine lipid, a helper lipid, a neutral lipid, a stealth lipid, and a targeting domain disclosed herein. In some embodiments, the targeted LNP is targeted to the lung, spleen, or bone marrow.

[0678] In some embodiments, the targeted LNP comprises (a) a first polynucleotide comprising an ORF encoding the first polypeptide, wherein the first polypeptide comprises first cleavase and a first intein, wherein the first cleavase is a S. pyogenes (Spy)Cas9 cleavase, said SpyCas9 cleavase comprising a R1333K mutation within its protospacer adjacent motif recognition domain; (b) a second polynucleotide comprising an ORF encoding the second polypeptide, wherein the second polypeptide comprises a second cleavase and a second intein capable of binding the first intein, wherein the second cleavase is an N. meningitidis (Nme)Cas9 cleavase, a C. jejuni (Cje) Cas9 cleavase, or a Simonsiella muelleri (Smu) Cas9 cleavase; and wherein the first polypeptide binds to the second polypeptide through intein catalysis; (c) a first guide RNA that directs the first cleavase to a first genomic locus; and (d) a second guide RNA that directs the second cleavase to a second genomic locus, wherein the second genomic locus is different from the first genomic locus. In some embodiments, a targeted LNP may comprise (a)-(c), an amine lipid, a helper lipid, a neutral lipid, a stealth lipid, and a targeting lipid component. In some embodiments, a targeted LNP may comprise (a)-(d), an amine lipid, a helper lipid, a neutral lipid, a stealth lipid, and a targeting domain. In some embodiments, the targeted LNP is targeted to the lung, spleen, or bone marrow.

[0679] In some embodiments, the targeted LNP comprises a nucleic acid, e.g., an RNA, component that includes one or more of an RNA-guided DNA binding agent, a Cas nuclease mRNA, a Class 2 Cas nuclease mRNA, a Cas9 mRNA, and a gRNA. In some embodiments, a targeted LNP may include a Class 2 Cas nuclease and a gRNA as the RNA component. In some embodiments, a targeted LNP may comprise the RNA component, an amine lipid, a helper lipid, a neutral lipid, a stealth lipid, and a targeting lipid component. In some embodiments, a targeted LNP may comprise the RNA component, an amine lipid, a helper lipid, a neutral lipid, a stealth lipid, and a targeting domain.

[0680] In some embodiments, a targeted LNP comprises an RNA component, which may comprise an mRNA, such as an mRNA encoding a Cas nuclease. In one embodiment, the RNA component may comprise a Cas9 mRNA. In some compositions comprising an mRNA encoding a Cas nuclease, the lipid nucleic acid assembly further comprises a gRNA nucleic acid, such as a gRNA. In some embodiments, the RNA component comprises a Cas nuclease mRNA and a gRNA. In some embodiments, the RNA component comprises a Class 2 Cas nuclease mRNA and a gRNA.

[0681] In some embodiments, a targeted LNP may comprise an mRNA encoding a Cas nuclease an amine lipid, a helper lipid, a neutral lipid, and a PEG lipid. In certain LNPs comprising an mRNA encoding a Cas nuclease such as a Class 2 Cas nuclease, the helper lipid is cholesterol. In other compositions comprising an mRNA encoding a Cas nuclease such as a Class 2 Cas nuclease, the neutral lipid is DSPC. In additional embodiments comprising an mRNA encoding a Cas nuclease such as a Class 2 Cas nuclease, the PEG lipid is PEG2k-DMG or PEG2k-C11. In specific compositions comprising an mRNA encoding a Cas nuclease such as a Class 2 Cas nuclease, the amine lipid is selected from Lipid A and its equivalents, such as an acetal analog of Lipid A, or amine lipids provided in WO2020/219876; or Lipid D or amine lipids provided in WO2020/072605.

[0682] In some embodiments, a targeted LNP may comprise a gRNA. In some embodiments, a targeted LNP may comprise an amine lipid, a gRNA, a helper lipid, a neutral lipid, and a PEG lipid. In certain LNPs comprising a gRNA, the helper lipid is cholesterol. In some compositions comprising a gRNA, the neutral lipid is DSPC. In additional embodiments comprising a gRNA, the PEG lipid is PEG2k-DMG or PEG2k-C11. In some embodiments, the amine lipid is selected from Lipid A and its equivalents, such as an acetal analog of Lipid A, or amine lipids provided in WO2020/219876 and their equivalents; or Lipid D or amine lipids provided in WO2020/072605 and their equivalents.

[0683] In one embodiment, a targeted LNP may comprise an sgRNA. In one embodiment, a targeted LNP may comprise a Cas9 sgRNA. In one embodiment, a targeted LNP may comprise a Cpf1 sgRNA. In some compositions comprising an sgRNA, the lipid nucleic acid assembly includes an amine lipid, a helper lipid, a neutral lipid, and a PEG lipid. In certain compositions comprising an sgRNA, the helper lipid is cholesterol. In other compositions comprising an sgRNA, the neutral lipid is DSPC. In additional embodiments comprising an sgRNA, the PEG lipid is PEG2k-DMG or PEG2k-C11. In some embodiments, the amine lipid is selected from Lipid A and its equivalents, such as acetal analogs of Lipid A, or amine lipids provided in WO2020/219876; or Lipid D or amine lipids provided in WO2020/072605.

[0684] In some embodiments, a targeted LNP comprises an mRNA encoding a Cas nuclease and a gRNA, which may be an sgRNA. In one embodiment, a targeted LNP may comprise an amine lipid, an mRNA encoding a Cas nuclease, a gRNA, a helper lipid, a neutral lipid, and a PEG lipid. In certain compositions comprising an mRNA encoding a Cas nuclease and a gRNA, the helper lipid is cholesterol. In some compositions comprising an mRNA encoding a Cas nuclease and a gRNA, the neutral lipid is DSPC. In additional embodiments comprising an mRNA encoding a Cas nuclease and a gRNA, the PEG lipid is PEG2k-DMG or PEG2k-C11. In some embodiments, the amine lipid is selected from Lipid A and its equivalents, such as acetal analogs of Lipid A, or amine lipids provided in WO2020/219876; or Lipid D or amine lipids provided in WO2020/072605.

[0685] In some embodiments, the targeted LNPs include a Cas nuclease mRNA, such as a Class 2 Cas mRNA and at least one gRNA. In some embodiments, the targeted LNP includes a ratio of gRNA to Cas nuclease mRNA, such as Class 2 Cas nuclease mRNA from about 25:1 to about 1:25 wt/wt. In some embodiments, the lipid nucleic acid assembly formulation includes a ratio of gRNA to Cas nuclease mRNA, such as Class 2 Cas nuclease mRNA from about 10:1 to about 1:10. In some embodiments, the lipid nucleic acid assembly formulation includes a ratio of gRNA to Cas nuclease mRNA, such as Class 2 Cas nuclease mRNA from about 8:1 to about 1:8. As measured herein, the ratios are by weight. In some embodiments, the lipid nucleic acid assembly formulation includes a ratio of gRNA to Cas nuclease mRNA, such as Class 2 Cas mRNA from about 5:1 to about 1:5. In some embodiments, ratio range is about 3:1 to about 1:3, about 2:1 to about 1:2, about 5:1 to about 1:2, about 5:1 to about 1:1, about 3:1 to about 1:2, about 3:1 to about 1:1, about 3:1, about 2:1 to about 1:1. In some embodiments, the gRNA to mRNA ratio is about 3:1 or about 2:1. In some embodiments the ratio of gRNA to Cas nuclease mRNA, such as Class 2 Cas nuclease is about 1:1. In some embodiments the ratio of gRNA to Cas nuclease mRNA, such as Class 2 Cas nuclease is about 1:2. The ratio may be about 25:1, 10:1, 5:1, 3:1, 2:1, 1:1, 1:2, 1:3, 1:5, 1:10, or 1:25.

[0686] The targeted LNPs disclosed herein may include a template nucleic acid. The template nucleic acid may be co-formulated with an mRNA encoding a Cas nuclease, such as a Class 2 Cas nuclease mRNA. In some embodiments, the template nucleic acid may be co-formulated with a guide RNA. In some embodiments, the template nucleic acid may be co-formulated with both an mRNA encoding a Cas nuclease and a guide RNA. In some embodiments, the template nucleic acid may be formulated separately from an mRNA encoding a Cas nuclease or a guide RNA. The template nucleic acid may be delivered with, or separately from the LNPs. In some embodiments, the template nucleic acid may be single- or double-stranded, depending on the desired repair mechanism. The template may have regions of homology to the target DNA, or to sequences adjacent to the target DNA.

[0687] In some embodiments, the targeted LNPs disclosed herein may be administered by intravenous, intradermal, subcutaneous, inhalation, intranasal, or intramuscular delivery.

E. Contacting Cells with LNP

[0688] In some embodiments, the LNP is pretreated with a serum factor before contacting the cell. In some embodiments, the LNP is pretreated with a primate serum factor before contacting the cell. In some embodiments, the LNP is pretreated with a human serum factor before contacting the cell.

[0689] In some embodiments, the methods disclosed herein comprise preincubating a serum factor and the LNP for about 30 seconds to overnight. In some embodiments, the preincubation step comprises preincubating a serum factor and the LNP for about 1 minute to 1 hour. In some embodiments, it comprises preincubating for about 1-30 minutes.

[0690] In some embodiments, the LNP compositions are administered sequentially. In some embodiments, the LNP compositions are administered simultaneously. In some embodiments, the population of cells is contacted with 3 LNP compositions. In some embodiments, the population of cells is contacted with 4 LNP compositions.

[0691] In some embodiments, the cells are frozen between sequential contacting or editing steps.

[0692] In some embodiments, the LNP is pretreated with a serum factor before contacting the cell. In some embodiments, the LNP is pretreated with a human serum before contacting the cell. In some embodiments, the LNP is pretreated with a serum replacement, e.g., a commercially available serum replacement, preferably wherein the serum replacement is appropriate for ex vivo use.

[0693] In some embodiments, a LNP is provided to a “non-activated” cell. A “non-activated” cell refers to a cell that has not been stimulated in vitro. In some embodiments, a “non-activated” T cell may have been stimulated in vivo (e.g., by antigen) while in the body, however said cell may be referred to as non-activated herein if said cell has not been stimulated in vitro in culture. An “activated” cell is also useful in the methods disclosed herein and can refer to a cell that has been stimulated in vitro. Agents for activating cells in vitro are provided herein and are known in the art, particularly for activation of T cells or B cells.

[0694] In some embodiments, the T cell is activated prior to contact with a LNP, is activated in between contact with LNPs, or is activated after contact with a LNP.

[0695] While the invention is described in conjunction with the illustrated embodiments, it is understood that they are not intended to limit the invention to those embodiments. On the contrary, the invention is intended to cover all alternatives, modifications, and equivalents, including equivalents of specific features, which may be included within the invention as defined by the appended claims.

### VII. Exemplary DNA Molecules, Vectors, Expression Constructs, Host Cells, and Production Methods

[0696] In certain embodiments, the disclosure provides one or more DNA molecule comprising a sequence encoding any of the nucleic acids (e.g., mRNAs) encoding a cleavase or a fusion protein described herein. In some embodiments, the DNA molecule may further include, but is not limited to, promoters, enhancers, and regulatory sequences.

[0697] In certain embodiments, the disclosure provides one or more DNA molecule comprising a sequence encoding one or more guide RNA as described herein. In some embodiments, the DNA molecule further may further include, but is not limited to, promoters, enhancers, and regulatory sequences. In some embodiments, the DNA molecule further comprises a promoter operably linked to the sequence encoding a guide RNA described herein.

[0698] In some embodiments, the DNA molecule further comprises a promoter operably linked to the sequence encoding any of the nucleic acids (e.g., mRNAs) encoding the cleavase or the fusion protein or the guide RNAs described herein. In some embodiments, the DNA molecule is an expression construct suitable for expression in a mammalian cell, e.g., a human cell or a mouse cell, such as a human hepatocyte or a rodent (e.g., mouse) hepatocyte. In some embodiments, the DNA molecule is an expression construct suitable for expression in a cell of a mammalian organ, e.g., a human liver or a rodent (e.g., mouse) liver. In some embodiments, the DNA molecule is a plasmid or an episome. In some embodiments, the DNA molecule is contained in a host cell, such as a bacterium or a cultured eukaryotic cell. Exemplary bacteria include proteobacteria such as E. coli. Exemplary cultured eukaryotic cells include primary hepatocytes, including hepatocytes of rodent (e.g., mouse) or human origin; hepatocyte cell lines, including hepatocytes of rodent (e.g., mouse) or human origin; human cell lines; rodent (e.g., mouse) cell lines; Chinese hamster ovary (CHO) cells; microbial fungi, such as fission or budding yeasts, e.g., Saccharomyces, such as S. cerevisiae; and insect cells.

[0699] In some embodiments, a method of producing a nucleic acid (e.g., an mRNA or guide RNA) disclosed herein is provided. In some embodiments, such a method comprises contacting a DNA molecule described herein with an RNA polymerase under conditions permissive for transcription. In some embodiments, the contacting is performed in vitro, e.g., in a cell-free system. In some embodiments, the RNA polymerase is an RNA polymerase of bacteriophage origin, such as T7 RNA polymerase. In some embodiments, NTPs are provided that include at least one modified nucleotide as discussed above. In some embodiments, the NTPs include at least one modified nucleotide as discussed above and do not comprise UTP.

[0700] In some embodiments, a nucleic acid (e.g., an mRNA or guide RNA) disclosed herein alone or together with one or more guide RNAs, may be comprised within or delivered by a vector system of one or more vectors. In some embodiments, one or more of the vectors, or all of the vectors, may be DNA vectors. In some embodiments, one or more of the vectors, or all of the vectors, may be RNA vectors. In some embodiments, one or more of the vectors, or all of the vectors, may be circular. In other embodiments, one or more of the vectors, or all of the vectors, may be linear. In some embodiments, one or more of the vectors, or all of the vectors, may be enclosed in a lipid nanoparticle, liposome, non-lipid nanoparticle, or viral capsid. Non-limiting exemplary vectors include plasmids, phagemids, cosmids, artificial chromosomes, minichromosomes, transposons, viral vectors, and expression vectors.

[0701] Non-limiting exemplary viral vectors include adeno-associated virus (AAV) vectors, lentivirus vectors, adenovirus vectors, helper dependent adenoviral (HDAd) vectors, herpes simplex virus (HSV-1) vectors, bacteriophage T4, baculovirus vectors, and retrovirus vectors. In some embodiments, the viral vector may be an AAV vector. In other embodiments, the viral vector may be a lentivirus vector. In some embodiments, the lentivirus may be non-integrating. In some embodiments, the viral vector may be an adenovirus vector. In some embodiments, the adenovirus may be a high-cloning capacity or “gutless” adenovirus, where all coding viral regions apart from the 5′ and 3′ inverted terminal repeats (ITRs) and the packaging signal (‘I’) are deleted from the virus to increase its packaging capacity. In yet other embodiments, the viral vector may be an HSV-1 vector. In some embodiments, the HSV-1-based vector is helper dependent, and in other embodiments it is helper independent. For example, an amplicon vector that retains only the packaging sequence requires a helper virus with structural components for packaging, while a 30 kb-deleted HSV-1 vector that removes non-essential viral functions does not require helper virus. In additional embodiments, the viral vector may be bacteriophage T4. In some embodiments, the bacteriophage T4 may be able to package any linear or circular DNA or RNA molecules when the head of the virus is emptied. In further embodiments, the viral vector may be a baculovirus vector. In yet further embodiments, the viral vector may be a retrovirus vector. In embodiments using AAV or lentiviral vectors, which have smaller cloning capacity, it may be necessary to use more than one vector to deliver all the components of a vector system as disclosed herein. For example, one AAV vector may contain sequences encoding a Cas protein, while a second AAV vector may contain one or more guide sequences.

[0702] In some embodiments, the vector may be capable of driving expression of one or more coding sequences, such as the coding sequence of an mRNA disclosed herein, in a cell. In some embodiments, the cell may be a prokaryotic cell, such as, e.g., a bacterial cell. In some embodiments, the cell may be a eukaryotic cell, such as, e.g., a yeast, plant, insect, or mammalian cell. In some embodiments, the eukaryotic cell may be a mammalian cell. In some embodiments, the eukaryotic cell may be a rodent cell. In some embodiments, the eukaryotic cell may be a human cell. Suitable promoters to drive expression in different types of cells are known in the art. In some embodiments, the promoter may be wild type. In other embodiments, the promoter may be modified for more efficient or efficacious expression. In yet other embodiments, the promoter may be truncated yet retain its function. For example, the promoter may have a normal size or a reduced size that is suitable for proper packaging of the vector into a virus.

[0703] In some embodiments, the promoter may be constitutive, inducible, or tissue-specific. In some embodiments, the promoter may be a constitutive promoter. Non-limiting exemplary constitutive promoters include cytomegalovirus (CMV) immediate early promoter, simian virus (SV40) promoter, adenovirus major late promoter (MLP), Rous sarcoma virus (RSV) promoter, mouse mammary tumor virus (MMTV) promoter, phosphoglycerate kinase (PGK) promoter, elongation factor-alpha (EF1a) promoter, ubiquitin promoters, actin promoters, tubulin promoters, immunoglobulin promoters, a functional fragment thereof, or a combination of any of the foregoing. In some embodiments, the promoter may be a CMV promoter. In some embodiments, the promoter may be a truncated CMV promoter. In other embodiments, the promoter may be an EF1a promoter. In some embodiments, the promoter may be an inducible promoter. Non-limiting exemplary inducible promoters include those inducible by heat shock, light, chemicals, peptides, metals, steroids, antibiotics, or alcohol. In some embodiments, the inducible promoter may be one that has a low basal (non-induced) expression level, such as, e.g., the Tet-On® promoter (Clontech).

[0704] In some embodiments, the promoter may be a tissue-specific promoter, e.g., a promoter specific for expression in the liver.

[0705] The vector may further comprise a nucleotide sequence encoding at least one guide RNA. In some embodiments, the vector comprises one copy of the guide RNA. In other embodiments, the vector comprises more than one copy of the guide RNA. In embodiments with more than one guide RNA, the guide RNAs may be non-identical such that they target different target sequences, or may be identical in that they target the same target sequence. In some embodiments where the vectors comprise more than one guide RNA, each guide RNA may have other different properties, such as activity or stability within a ribonucleoprotein complex with the cleavase or the fusion protein disclosed herein. In some embodiments, the nucleotide sequence encoding the guide RNA may be operably linked to at least one transcriptional or translational control sequence, such as a promoter, a 3′ UTR, or a 5′ UTR. In one embodiment, the promoter may be a tRNA promoter, e.g., tRNA^{Lys3}, or a tRNA chimera. See Mefferd et al., RNA. 2015 21:1683-9; Scherer et al., Nucleic Acids Res. 2007 35: 2620-2628. In some embodiments, the promoter may be recognized by RNA polymerase III (Pol III). Non-limiting examples of Pol III promoters include U6 and H1 promoters. In some embodiments, the nucleotide sequence encoding the guide RNA may be operably linked to a mouse or human U6 promoter. In other embodiments, the nucleotide sequence encoding the guide RNA may be operably linked to a mouse or human H1 promoter. In embodiments with more than one guide RNA, the promoters used to drive expression may be the same or different. In some embodiments, the nucleotide encoding the crRNA of the guide RNA and the nucleotide encoding the trRNA of the guide RNA may be provided on the same vector. In some embodiments, the nucleotide encoding the crRNA and the nucleotide encoding the trRNA may be driven by the same promoter. In some embodiments, the crRNA and trRNA may be transcribed into a single transcript. For example, the crRNA and trRNA may be processed from the single transcript to form a double-molecule guide RNA. Alternatively, the crRNA and trRNA may be transcribed into a single-molecule guide RNA. In other embodiments, the crRNA and the trRNA may be driven by their corresponding promoters on the same vector. In yet other embodiments, the crRNA and the trRNA may be encoded by different vectors.

[0706] In some embodiments, the composition may comprise a vector system, wherein the system comprises more than one vector. In some embodiments, the vector system may comprise one single vector. In other embodiments, the vector system may comprise two vectors. In additional embodiments, the vector system may comprise three vectors. When multiple copies of the guide RNA are used, the vector system may comprise more than three vectors.

[0707] In some embodiments, the vector system may comprise inducible promoters to start expression only after it is delivered to a target cell. Non-limiting exemplary inducible promoters include those inducible by heat shock, light, chemicals, peptides, metals, steroids, antibiotics, or alcohol. In some embodiments, the inducible promoter may be one that has a low basal (non-induced) expression level, such as, e.g., the Tet-On® promoter (Clontech).

[0708] In additional embodiments, the vector system may comprise tissue-specific promoters to start expression only after it is delivered into a specific tissue.

### VIII. Cells

[0709] In some embodiments, a cell contacted with the fusion protein disclosed herein is a human cell.

[0710] In some embodiments, a cell is contacted with a fusion protein disclosed herein comprising (a) a first cleavase and a guide RNA (gRNA) that targets at least one genomic locus and that is cognate to the first cleavase; and (b) a second cleavase and a gRNA that targets at least one genomic locus and that is cognate to the second cleavase, wherein the first cleavase is orthogonal to the second cleavase, thereby generating a deletion in the cell.

[0711] In some embodiments, a cell is contacted with a fusion protein disclosed herein comprising (a) a first cleavase and a guide RNA (gRNA) that targets at least one genomic locus and that is cognate to the first cleavase; and (b) a second cleavase and a gRNA that targets at least one genomic locus and that is cognate to the second cleavase, wherein the first cleavase is orthogonal to the second cleavase, thereby excising a DNA sequence between a first cleavage site cleaved by the first cleavase and a second cleavage site cleaved by the second cleavase; in some embodiments, the cell is cultured, thereby producing a population of cells comprising edited cells comprising deletions.

[0712] In some embodiments, a cell is treated in vitro with any method or composition disclosed herein. In some embodiments, a cell is treated in vivo with any method or composition disclosed herein.

[0713] In some embodiments, the cell in any of the embodiments provided herein is engineered by a fusion protein disclosed herein.

[0714] In some embodiments, the fusion protein disclosed herein is delivered to the cell via electroporation. In some embodiments, the fusion protein disclosed herein is delivered to the cell via at least one lipid nanoparticle (LNP). In some embodiments, the fusion protein disclosed herein is delivered to the cell on at least one vector. In some embodiments, the fusion protein disclosed herein is delivered as at least one nucleic acid encoding the fusion protein disclosed herein. In some embodiments, the at least one nucleic acid comprises at least one mRNA. In some embodiments, the fusion protein disclosed herein is delivered to the cell as at least one polypeptide or at least one mRNA. In some embodiments, the at least one gRNA is delivered to the cell as at least one polynucleotide that encodes the gRNA.

[0715] In some embodiments, the cell is an immune cell. As used herein, “immune cell” refers to a cell of the immune system, including e.g., a lymphocyte (e.g., T cell, B cell, natural killer cell (“NK cell”, and NKT cell, or iNKT cell)), monocyte, macrophage, mast cell, dendritic cell, or granulocyte (e.g., neutrophil, eosinophil, and basophil). In some embodiments, the cell is a primary immune cell. In some embodiments, the immune system cell may be selected from CD3⁺, CD4⁺ and CD8⁺ T cells, regulatory T cells (Tregs), B cells, NK cells, and dendritic cells (DC). In some embodiments, the immune cell is allogeneic.

[0716] In some embodiments, the cell is a lymphocyte. In some embodiments, the cell is an adaptive immune cell. In some embodiments, the cell is a T cell. In some embodiments, the cell is a B cell. In some embodiments, the cell is a NK cell.

[0717] In some embodiments, the cell is a mononuclear cell, such as from bone marrow or peripheral blood. In some embodiments, the cell is a peripheral blood mononuclear cell (“PBMC”). In some embodiments, the cell is a PBMC, e.g. a lymphocyte or monocyte. In some embodiments, the cell is a peripheral blood lymphocyte (“PBL”).

[0718] In some embodiments, the cell is derived from a progenitor cell before editing. In some embodiments, the cell is an induced pluripotent stem cell (iPSC).

[0719] Cells used in ACT therapy are included, such as mesenchymal stem cells (e.g., isolated from bone marrow (BM), peripheral blood (PB), placenta, umbilical cord (UC) or adipose); hematopoietic stem cells (HSCs; e.g. isolated from BM); mononuclear cells (e.g., isolated from BM or PB); endothelial progenitor cells (EPCs; isolated from BM, PB, and UC); neural stem cells (NSCs); limbal stem cells (LSCs); or tissue-specific primary cells or cells derived therefrom (TSCs). Cells used in ACT therapy further include induced pluripotent stem cells (iPSCs; see e.g., Mahla, International J. Cell Biol. 2016 (Article ID 6940283): 1-24 (2016)) that may be induced to differentiate into other cell types including e.g., islet cells, neurons, and blood cells; ocular stem cells; pluripotent stem cells (PSCs); embryonic stem cells (ESCs); cells for organ or tissue transplantations such as islet cells, cardiomyocytes, thyroid cells, thymocytes, neuronal cells, skin cells, retinal cells, chondrocytes, myocytes, and keratinocytes.

[0720] In some embodiments, the cell is a human cell, such as a cell from a subject. In some embodiments, the cell is isolated from a human subject. In some embodiments, the cell is isolated from a patient. In some embodiments, the cell is isolated from a donor. In some embodiments, the cell is isolated from human donor PBMCs or leukopaks. In some embodiments, the cell is from a subject with a condition, disorder, or disease. In some embodiments, the cell is from a human donor with Epstein Barr Virus (“EBV”).

[0721] In some embodiments, the methods disclosed herein are carried out ex vivo. As used herein, “ex vivo” refers to an in vitro method wherein the cell is capable of being transferred into a subject, e.g. as an ACT therapy. In some embodiments, an ex vivo method is an in vitro method involving an ACT therapy cell or cell population.

[0722] In some embodiments, the cell is maintained in culture. In some embodiments, the cell is transplanted into a patient. In some embodiments, the cell is removed from a subject, genetically modified ex vivo, and then administered back to the same patient. In some embodiments, the cell is removed from a subject, genetically modified ex vivo, and then administered to a subject other than the subject from which it was removed.

[0723] In some embodiments, the cell is from a cell line. In some embodiments, the cell line is derived from a human subject. In some embodiments, the cell line is a lymphoblastoid cell line (“LCL”). The cell may be cryopreserved and thawed. The cell may not have been previously cryopreserved.

[0724] In some embodiments, the cell is from a cell bank. In some embodiments, the cell is genetically modified and then transferred into a cell bank. In some embodiments the cell is removed from a subject, genetically modified ex vivo, and transferred into a cell bank. In some embodiments, a genetically modified population of cells is transferred into a cell bank. In some embodiments, a genetically modified population of immune cells is transferred into a cell bank. In some embodiments, a genetically modified population of immune cells comprising a first and second subpopulations, wherein the first and second sub-populations have at least one common genetic modification and at least one different genetic modification are transferred into a cell bank.

[0725] In some embodiments, a population of cells comprises any cell edited using any method or composition disclosed herein.

[0726] In some embodiments, a population of cells comprises edited T cells, and wherein at least 30%, 40%, 50%, 55%, 60%, 65% of the cells of the population have a memory phenotype (CD27+, CD45RA+).

[0727] In some embodiments, a population of cells comprises non-activated immune cells. In some embodiments, the population of cells comprises activated immune cells.

[0728] In some embodiments, a population of cells comprises T cells and is responsive to repeat stimulation after editing. In some embodiments, the population of cells is cultured, expanded, differentiated, or proliferated ex vivo.

[0729] Both the foregoing general description and detailed description, as well as the following examples, are exemplary and explanatory only and are not restrictive of the teachings.

[0730] The section headings used herein are for organizational purposes only and are not to be construed as limiting the desired subject matter in any way. In the event that any literature incorporated by reference contradicts any term defined in this specification, this specification controls. All ranges given in the application encompass the endpoints unless stated otherwise.

### EXAMPLES

[0731] The following examples are provided to illustrate certain disclosed embodiments and are not to be construed as limiting the scope of this disclosure in any way.

### Example 1. Materials and Methods

In Vitro Transcription (“IVT”) of Nuclease mRNA

[0732] Capped and polyadenylated mRNA containing N1-methyl pseudo-U was generated by in vitro transcription using a linearized plasmid DNA template and T7 RNA polymerase. The linearized plasmid DNA containing a T7 promoter, and a sequence for transcription was linearized by restriction endonuclease digestion followed by heat inactivation of the reaction mixture, and purified from enzyme and buffer salts. Following the IVT reaction, the modified mRNA was synthesized and purified by standard techniques.

[0733] Streptococcus pyogenes (“Spy”) Cas9 mRNA was generated from plasmid DNA encoding an open reading frame according to SEQ ID Nos: 18, 36, 94, or 110 (see sequences in Table 37). When the sequences cited in this paragraph are referred to below with respect to RNAs, it is understood that Ts should be replaced with Us (which can be modified nucleosides as described above). Messenger RNAs used in the Examples. Guide RNAs were chemically synthesized by commercial vendors or using standard in vitro synthesis techniques with modified nucleotides.

### LNP Formulation

[0734] In general, the lipid nanoparticle components were dissolved in 100% ethanol at various molar ratios. The RNA cargos (e.g., Cas9 mRNA and sgRNA) were dissolved in 25 mM citrate, 100 mM NaCl, pH 5.0, resulting in a concentration of RNA cargo of approximately 0.45 mg/mL. The LNPs used contained ionizable lipid ((9Z,12Z)-3-((4,4-bis(octyloxy)butanoyl)oxy)-2-((((3-(diethylamino)propoxy)carbonyl)oxy)methyl)propyl octadeca-9,12-dienoate, also called 3-((4,4-bis(octyloxy)butanoyl)oxy)-2-((((3-(diethylamino)propoxy)carbonyl)oxy)methyl)propyl (9Z,12Z)-octadeca-9,12-dienoate), also called herein Lipid A, cholesterol, distearoylphosphatidylcholine (DSPC), and 1,2-dimyristoyl-rac-glycero-3-methoxypolyethylene glycol-2000 (PEG2K-DMG) (e.g., catalog #GM-020 from NOF, Tokyo, Japan) in a molar ratio of 50% Lipid A, 38% cholesterol, 9% DSPC, and 3% PEG2k-DMG. The LNPs were formulated with a lipid amine to RNA phosphate (N:P) molar ratio of about 6.

[0735] The LNPs were prepared using a cross-flow technique utilizing impinging jet mixing of the lipid in ethanol with two volumes of RNA solutions and one volume of water. First, the lipid in ethanol was mixed through a mixing cross with the two volumes of RNA solution. Then, a fourth stream of water was mixed with the outlet stream of the cross through an inline tee (See WO2016010840 FIG. 2). The LNPs were held for 1 hour at room temperature, and further diluted with water (approximately 1:1 v/v). Diluted LNPs were buffer exchanged into 50 mM Tris, 45 mM NaCl, 5% (w/v) sucrose, pH 7.5 (TSS) and concentrated as needed by methods known in the art. The resulting mixture was then filtered using a 0.2 m sterile filter. The final LNPs were characterized to determine the encapsulation efficiency, polydispersity index, and average particle size. The final LNPs were stored at 4° C. or −80° C. until further use.

sgRNA and Cas9 mRNA Lipofection

[0736] Lipofection of Cas9 mRNA and gRNAs used pre-mixed lipid formulations. The lipofection reagent contained ionizable Lipid A, cholesterol, DSPC, and PEG2k-DMG in a molar ratio of 50% Lipid A, 38% cholesterol, 9% DSPC, and 3% PEG2k-DMG. This mixture was reconstituted in 100% ethanol then mixed with RNA (e.g., Cas9 mRNA and gRNA) at a lipid amine to RNA phosphate (N:P) molar ratio of about 6 to produce lipid nucleic acid mixtures. An mRNA comprising a Cas9 ORF of Table 37 was produced by in vitro transcription (IVT) as described in WO2019/067910, see e.g., ¶354, using a 2 hour IVT reaction time and purifying the mRNA by LiCl precipitation followed by tangential flow filtration.

[0737] Lipofections were performed with a ratio of gRNA to mRNA of 1:2 by weight, unless otherwise indicated. Briefly, cells were incubated at 37° C., 5% CO2 for 24 hours prior to treatment with the lipid nucleic acid mixtures. Lipid nucleic acid mixtures were incubated in media containing 6% cynomolgus monkey or 6% fetal bovine serum (FBS) at 37° C. for 10 minutes. Post-incubation, the lipid nucleic acid mixtures were added to the cells (e.g., primary mouse hepatocytes) in an 8 or 12 point 3-fold dose response curve starting at 300 ng Cas9 mRNA, unless otherwise indicated. The cells were lysed 72 hours post-treatment, unless otherwise indicated, for NGS analysis as described in Example 1.

### Next-Generation Sequencing (“NGS”) and Analysis for Editing Efficiency

[0738] DNA was extracted using a commercial kit according to the manufacturer's protocol, for example QuickExtract™ DNA Extraction Solution (Lucigen, Cat. QE09050). To quantitatively determine the efficiency of editing at the target location in the genome, deep sequencing was utilized to identify the presence of excisions, insertions, deletions, and inversions introduced by gene editing. PCR primers were designed within the gene of interest (e.g., TTR). When the gene of interest was a SEAP reporter, a second set of PCR primers were designed around the target site within the gene of interest and the genomic area of interest was amplified. Primer sequence design was done as is standard in the field.

[0739] Additional PCR was performed according to the manufacturer's protocols (Illumina) to add chemistry for sequencing. The amplicons were sequenced on an Illumina MiSeq instrument. The reads were aligned to the reference genome (e.g., mm10) after eliminating those having low quality scores. Reads that overlapped the target region of interest were re-aligned to the local genome sequence to improve the alignment. Then the number of wild-type reads versus the number of reads which contain excisions, inversions or indels was calculated. Insertions and deletions were scored in a 20 bp region centered on the predicted Cas9 cleavage site. Indel percentage is defined as the total number of sequencing reads with one or more base inserted or deleted within the 20 bp scoring region divided by the total number of sequencing reads, including wild type. Five editing percentages were calculated when using orthogonal Cas9-Cas9 fusion nucleases, including:
[0740] 1) Spy indel percentage, resulting from insertions and/or deletions effected by the SpyCas9 moiety of orthogonal Cas9-Cas9 fusion, guided by a SpyCas9 sgRNA to its target cut site,
[0741] 2) Nme indel percentage, resulting from insertions and/or deletions effected by the Nme2Cas9 moiety of orthogonal Cas9-Cas9 fusion, guided by a Nme2Cas9 sgRNA to its target cut site,
[0742] 3) Excision percentage, resulting from both the SpyCas9 and Nme2Cas9 moieties of orthogonal Cas9-Cas9 fusion effecting cuts at both cut sites targeted by a SpyCas9 and a Nme2Cas9, causing an excision of the sequence comprised between both cut sites,
[0743] 4) “Indels in both” percentage, resulting from insertions and/or deletions effected by both the SpyCas9 and Nme2Cas9 moieties of orthogonal Cas9-Cas9 fusion at both cut sites targeted by the Spy and Nme sgRNAs, without excision of the sequence between the cut sites,
[0744] 5) Inversion percentage, resulting from both the SpyCas9 and Nme2Cas9 moieties of orthogonal Cas9-Cas9 fusion effecting cuts at both cut sites targeted by a SpyCas9 and a Nme2Cas9, causing an inversion of the sequence comprised between both cut sites.

[0745] Each of the five editing type percentages is defined as the total number of sequencing reads with each edit divided by the total number of reads overlapping both predicted cut sites.

[0746] Reported measurements in the Pipeline Columns used for excision analysis were obtained as follows. Amplicon-Seq libraries were sequenced with pair-end 150 bp. Two reads in a pair were merged into a single read with the following parameters: -m 5 -M 150. Merged reads shorter than 150 bp were discarded. The rest of the reads were aligned to the reference genome. Unmerged R1 and R2 reads were aligned to the reference genome separately. Their coverage on the target site was calculated. Alignments from the unmerged end with higher coverage on the target site were combined with alignments of merged reads. Alignments more than 150 bp away from the gRNA target site were discarded. Reads with PHRED score below 10 in any position were also discarded. Reads with alignment near the target site were re-aligned to the local genomic sequence with Smith-Waterman algorithm (Smith & Waterman, 1981; Zhao et al., 2013). Those reads were simultaneously aligned to a predicted inversion sequence with the same algorithm and parameters. The reads were classified as “inversion” if the alignment score with the predicted inversion was higher than with the wild-type reference sequence. Nucleotides within 5 base pairs from the target Cas9 cut sites (i.e., within an “indel window”) were evaluated for insertions or deletions (collectively “indels”). Alignments that failed to completely cover both indel windows of the two guides were discarded. An “excision” is defined as a single long deletion that starts within the indel window of one guide RNA and ends within the indel window of the other guide RNA. If indels were detected in both windows but failed to satisfy the excision criteria, the reads were classified as “non excision indels”. Conversely, if indels were detected in only one of the two windows, the reads were then classified as “indel only in left” or “indel only in right” (e.g., “single guide indel”, “Spy only indel”, “Nme only indel”), with left defined as the guide with lower coordinate target site.

### Example 2—Wild-Type Double-Cleavase Editing and Excision Activity

[0747] A SpyCas9 cleavase tethered to NmeCas9 cleavase was tested in HEK-Blue IL-1B SEAP reporter cells for its editing and excision activity. HEK-Blue IL-1B cells (Invivogen, Cat #hkb-il1b) were grown in Growth Medium (DMEM, 4.5 g/l glucose, 2 mM L-Glutamine, 10% (v/v) fetal bovine serum (FBS), 50 U/ml penicillin, 50 mg/ml streptomycin, 100 mg/ml Normocin™ (Invivogen, Cat #ant-nr-1)) or Test Medium (DMEM, 4.5 g/l glucose, 2 mM L-Glutamine, 10% (v/v) heat-inactivated FBS (30 min at 56° C.), 50 U/ml penicillin, 50 mg/ml streptomycin, 100 mg/ml Normocin™, Hygromycin B Gold (Invivogen, Cat #ant-hg-1), Zeomicin (Invivogen Cat #ant-zn-05)) as per the manufacturer's instructions in 96-well plates at a density of 10,000 cells/well. Cells were incubated at 37° C. and under 5% CO₂ atmosphere for 18-20 hours and were co-transfected using Lipofectamine™ 3000 Transfection Reagent (Thermo Fisher Scientific, Cat #L3000015) as per the manufacturer's instructions (0.3 uL Lipofectamine3000/well) with 50 ng of plasmid encoding a nuclease construct, and 50 ng of plasmid encoding a Spy guide RNA targeting SEAP and/or 50 ng of plasmid encoding a Nme guide RNA targeting SEAP. The targeting sequences of Spy and or Nme guides targeting SEAP are shown in Table 5. Three nuclease plasmids were used, each encoding one of: a wild-type NmeCas9 (SEQ ID NO: 106), a wild-type SpyCas9 (SEQ ID NO: 110), or a WT SpyCas9-WT NmeCas9 fusion construct (SEQ ID NO: 96).

TABLE 5
SEAP Guide RNA target sequences

| | | SEQ ID |
|---|---|---|
| | | NO of |
| | | Target |
| Guide ID | Target Sequence | sequence. |
| plCR012468 | UGGCGCUUCGCCAGCCAUUCCUGC | 261 |
| plCR012469 | CCCGGGGCGGUCCCGGUCCAAGCG | 262 |
| plG000665 | CUCCCUGAUGGAGAUGACAG | 263 |
| plG012746 | CACCUUGGCUGUAGUCAUCU | 264 |
| plG012684 | CAGUGCGGUUCCACACAUAC | 265 |
| plG012685 | AAGCCUGCAUGAGCUCAGUG | 266 |
| plG012686 | AUGGGUCACAGACGGGUCCA | 267 |
| plG012687 | CUCAAAGAGACCCAUGAGAU | 268 |
| plG012688 | AUCUCGUAUUUCAUGUCUCC | 269 |

[0748] Three days after transfection, media was removed and the cells were lysed with QuickExtract™ DNA Extraction Solution (Lucigen, Cat. QE09050). NGS analysis was performed as described in Example 1. Percent editing in HEK-Blue cells is shown in Table 6, and illustrated in FIG. 1.

TABLE 6
Editing as a percentage of total NGS reads in HEK-Blue cells

| | | | Nme9 only | | Spy9 only | | | | Indels | | | |
|---|---|---|---|---|---|---|---|---|---|---|---|---|
| | Guide ID | | indels | | indels | | Excisions | | in both | | Inversions | |
| Nuclease | Spy | Nme | Mean | SD | Mean | SD | Mean | SD | Mean | SD | Mean | SD |
| WT SpyCas9 (n = 1) | plG000665 | None | 0.00 | N/A | 0.00 | N/A | 0.00 | N/A | 0.00 | N/A | 0.00 | N/A |
| | plG012688 | | 0.00 | N/A | 10.90 | N/A | 0.00 | N/A | 0.00 | N/A | 0.00 | N/A |
| | plG012687 | | 0.00 | N/A | 14.88 | N/A | 0.00 | N/A | 14.68 | N/A | 0.00 | N/A |
| | plG012686 | | 0.02 | N/A | 19.57 | N/A | 0.12 | N/A | 7.51 | N/A | 0.00 | N/A |
| | plG012685 | | 0.03 | N/A | 30.28 | N/A | 0.00 | N/A | 3.47 | N/A | 0.00 | N/A |
| | plG012684 | | 0.02 | N/A | 16.08 | N/A | 0.18 | N/A | 0.29 | N/A | 0.00 | N/A |
| | plG012746 | | 0.00 | N/A | 8.75 | N/A | 0.00 | N/A | 2.72 | N/A | 0.00 | N/A |
| WT NmeCas9 (n = 1) | None | plCR012468 | 2.34 | N/A | 0.00 | N/A | 0.00 | N/A | 0.00 | N/A | 0.00 | N/A |
| SpyCas9-NmeCas9 | None | plCR012468 | 0.19 | N/A | 0.00 | N/A | 0.00 | N/A | 0.00 | N/A | 0.00 | N/A |
| fusion (n = 1) | | | | | | | | | | | | |
| SpyCas9-NmeCas9 | plG000665 | None | 0.00 | 0.00 | 0.00 | 0.00 | 0.00 | 0.00 | 0.00 | 0.00 | 0.00 | 0.00 |
| fusion (n = 2) | plG012688 | | 0.00 | 0.00 | 2.53 | 0.19 | 0.00 | 0.00 | 0.01 | 0.02 | 0.00 | 0.00 |
| | plG012687 | | 0.00 | 0.00 | 3.55 | 0.06 | 0.00 | 0.00 | 0.01 | 0.02 | 0.00 | 0.00 |
| | plG012686 | | 0.00 | 0.00 | 3.31 | 0.47 | 0.00 | 0.00 | 0.00 | 0.00 | 0.00 | 0.00 |
| | plG012685 | | 0.01 | 0.01 | 4.93 | 1.67 | 0.00 | 0.00 | 0.00 | 0.00 | 0.00 | 0.00 |
| | plG012684 | | 0.01 | 0.02 | 4.54 | 0.10 | 0.00 | 0.00 | 0.00 | 0.00 | 0.00 | 0.00 |
| | plG012746 | | 0.01 | 0.01 | 1.50 | 0.26 | 0.00 | 0.00 | 0.00 | 0.00 | 0.00 | 0.00 |
| SpyCas9-NmeCas9 | plG000665 | plCR012468 | 0.15 | 0.04 | 0.02 | 0.00 | 0.00 | 0.00 | 0.00 | 0.00 | 0.00 | 0.00 |
| fusion (n = 2) | plG012688 | | 0.10 | 0.08 | 1.20 | 0.23 | 26.77 | 1.65 | 0.21 | 0.25 | 0.04 | 0.01 |
| | plG012687 | | 0.11 | 0.03 | 1.63 | 0.16 | 21.23 | 0.13 | 1.22 | 1.19 | 0.01 | 0.02 |
| | plG012686 | | 0.08 | 0.03 | 1.93 | 0.91 | 14.28 | 0.91 | 1.23 | 1.32 | 0.04 | 0.06 |
| | plG012685 | | 0.03 | 0.04 | 2.03 | 0.31 | 13.16 | 1.36 | 0.39 | 0.47 | 0.05 | 0.01 |
| | plG012684 | | 0.03 | 0.02 | 3.63 | 0.42 | 2.84 | 0.35 | 0.15 | 0.01 | 0.05 | 0.07 |
| | plG012746 | | 0.06 | 0.02 | 0.36 | 0.04 | 14.99 | 0.80 | 0.01 | 0.02 | 0.03 | 0.04 |

### Example 3—PAM-Attenuated Cleavase Fusion Editing and Excision Activity

[0749] A PAM-attenuated SpyCas9 tethered to NmeCas9 (orthogonal Cas9-Cas9 fusion construct) was tested in HEK-Blue IL-1B SEAP reporter cells for its editing and excision activity. HEK-Blue IL-1B cells (Invivogen, Cat #hkb-il1b) were grown in Growth Medium (DMEM, 4.5 g/l glucose, 2 mM L-Glutamine, 10% (v/v) fetal bovine serum (FBS), 50 U/ml penicillin, 50 mg/ml streptomycin, 100 mg/ml Normocin™ (Invivogen, Cat #ant-nr-1)) or Test Medium (DMEM, 4.5 g/l glucose, 2 mM L-Glutamine, 10% (v/v) heat-inactivated FBS (30 min at 56° C.), 50 U/ml penicillin, 50 mg/ml streptomycin, 100 mg/ml Normocin™, Hygromycin B Gold (Invivogen, Cat #ant-hg-1), Zeomicin (Invivogen Cat #ant-zn-05)) as per the manufacturer's instructions in 96-well plates at a density of 10,000 cells/well. Cells were incubated at 37° C. and under 5% CO₂ atmosphere for 18-20 hours and were co-transfected using Lipofectamine™ 3000 Transfection Reagent (Thermo Fisher Scientific, Cat #L3000015) as per manufacturer's instructions (0.3 uL Lipofectamine3000/well) with 50 ng of plasmid encoding a nuclease construct, and 50 ng of plasmid encoding a Spy guide RNA (SEQ ID NO: 257) targeting SEAP and/or 50 ng of plasmid encoding a Nme guide RNA (SEQ ID NO: 238) targeting SEAP. Five nuclease plasmids were used, each encoding one of: a wild-type NmeCas9 (SEQ ID NO: 106), a wild-type SpyCas9 (SEQ ID NO: 110), an R1335S SpyCas9 tethered to a wild-type NmeCas9 (SEQ ID NO: 98), an R1333K SpyCas9 tethered to a wild-type NmeCas9 (SEQ ID NO: 100), and a wild-type SpyCas9 tethered to a wild-type NmeCas9 (SEQ ID NOs: 102). The orthogonal Cas9-Cas9 fusion constructs are described in Table 7.

[0750] Three days after transfection, media was removed and the cells were lysed with QuickExtract™ DNA Extraction Solution (Lucigen, Cat. QE09050). NGS analysis was performed as described in Example 1. Percent editing in HEK-Blue cells is shown in Table 8, and illustrated in FIG. 2.

TABLE 7
Nuclease sequences

| | SEQ | SpyCas9 | | NmeCas9 | Relative orientation |
|---|---|---|---|---|---|
| Construct | ID NO. | moiety | Linker | moiety | of nuclease moieties |
| WT Spy-WT Nme | 102 | WT Spy | linker | WT Nme | WT Spy-linker 81aa- |
| fusion | | | 81aa | | WT Nme |
| R1335S Spy-WT | 98 | R1335S | linker | WT Nme | R1335S Spy-linker |
| Nme fusion | | Spy | 81aa | | 81aa-WT Nme |
| R1333K Spy-WT | 100 | R1333K | linker | WT Nme | R1333K Spy-linker |
| Nme fusion | | Spy | 81aa | | 81aa-WT Nme |

TABLE 8
Editing as a percentage of total reads in HEK-Blue cells

| | Nme indels | | Spy indels | | Excisions | | Indels in both | | Inversions | |
|---|---|---|---|---|---|---|---|---|---|---|
| Plasmid | Mean | SD | Mean | SD | Mean | SD | Mean | SD | Mean | SD |
| WT Spy-WT Nme fusion | 0.49 | 0.14 | 8.02 | 0.96 | 41.86 | 1.39 | 2.06 | 0.39 | 0.32 | 0.27 |
| R1335S Spy-WT Nme | 2.36 | 0.52 | 0.02 | 0.03 | 4.28 | 1.04 | 0.04 | 0.07 | 0.00 | 0.00 |
| fusion | | | | | | | | | | |
| R1333K Spy-WT Nme | 0.47 | 0.08 | 1.31 | 0.07 | 33.35 | 3.19 | 0.57 | 0.23 | 0.30 | 0.11 |
| fusion | | | | | | | | | | |
| WT Nme + WT Spy | 0.75 | 0.27 | 18.31 | 0.67 | 37.79 | 2.80 | 5.48 | 0.89 | 1.22 | 0.27 |
| WT Spy alone | 0.12 | 0.10 | 63.19 | 5.36 | 0.05 | 0.05 | 4.39 | 5.26 | 0.00 | 0.00 |
| WT Nme alone | 11.69 | 0.49 | 0.00 | 0.00 | 0.00 | 0.00 | 0.62 | 0.82 | 0.00 | 0.00 |

### Example 4—Orthogonal Cas9-Cas9 Fusion Linker and Rec Domain-Null mRNA Editing in Hepa1-6 Mouse Cells and Primary Mouse Hepatocytes

[0751] Orthogonal Cas9-Cas9 fusion constructs with various amino acid linkers, as described in Table 9, were tested for excision efficacy in Hepa1-6 cells and Primary Mouse Hepatocytes (PMH). Hepa1-6 cells were cultured in DMEM media supplemented with 10% fetal bovine serum at a density of 9,000 cells/well in a 96-well plate and left to adhere overnight two days prior to transfection. PMH (Gibco, MC839) were thawed and resuspended in 50 mL Cryopreserved Hepatocyte Recovery Media (CHRM) (Invitrogen, CM7000) followed by centrifugation; cells were then resuspended in hepatocyte medium with plating supplements: William's E Medium Plating Supplements with FBS content (Gibco, Cat. A13450), pelleted by centrifugation, resuspended in media and plated at a density of 15,000 cells/well on Bio-coat collagen I coated 96-well plates (Corning #354407). Plated PMH were allowed to settle and adhere for 4-6 hours in a tissue culture incubator at 37° C. and 5% CO₂ atmosphere. After incubation PMH were checked for monolayer formation, existing media was aspirated and cells were plated with 100 uL hepatocyte maintenance medium: William's E Medium (Gibco, Cat. A12176-01) plus supplement pack (Gibco, Cat. CM3000) and left to adhere overnight prior to transfection. Both cell types were transfected using 0.6 uL/well Lipofectamine Messenger Max (ThermoFisher, Cat. LMRNA001) diluted in OptiMem Medium (ThermoFisher, Cat. 31985062) according to the manufacturer's protocol with, in each well, 100 ng SpyCas9 mRNA equivalents of a nuclease or orthogonal Cas9-Cas9 fusion construct as described in Tables 9 and 10, 50 nM SpyCas9 guide and 50 nM NmeCas9 guide. mRNA and guide were added in two separate lipoplexes (0.3 uL/well for each). DNA isolation and NGS analysis were performed as described in Example 1.

TABLE 9
mRNA sequences

| | SEQ | SpyCas9 | | NmeCas9 | Relative orientation |
|---|---|---|---|---|---|
| Construct | ID NO. | moiety | Linker | moiety | of nuclease moieties |
| mRNA A | 1 | R1333K | linker 81aa | WT | R1333K Spy-linker |
| | | Spy | | Nme2 | 81aa-WT Nme2 |
| mRNA N | 46 | WT Spy | linker 81aa | WT | WT Spy-linker 81aa- |
| | | | | Nme2 | WT Nme2 |
| mRNA O | 48 | R1333K | linker 71aa | WT | R1333K Spy-linker |
| | | Spy | | Nme2 | 71aa-WT Nme2 |
| mRNA P | 53 | R1333K | linker 61aa | WT | R1333K Spy-linker |
| | | Spy | | Nme2 | 61aa-WT Nme2 |
| mRNA Q | 58 | R1333K | linker 51aa | WT | R1333K Spy-linker |
| | | Spy | | Nme2 | 51aa-WT Nme2 |
| mRNA R | 63 | R1333K | linker 41aa | WT | R1333K Spy-linker |
| | | Spy | | Nme2 | 41aa-WT Nme2 |
| mRNA S | 68 | R1333K | linker 31aa | WT | R1333K Spy-linker |
| | | Spy | | Nme2 | 31aa-WT Nme2 |
| mRNA T | 73 | R1333K | linker 21aa | WT | R1333K Spy-linker |
| | | Spy | | Nme2 | 21aa-WT Nme2 |
| mRNA U | 78 | R1333K | linker 11aa | WT | R1333K Spy-linker |
| | | Spy | | Nme2 | 11aa-WT Nme2 |
| mRNA V | 83 | Spy | linker 81aa | WT | SpydRec2-linker |
| | | dRec2 | | Nme2 | 81aa-WT Nme2 |
| mRNA W | 88 | Spy | linker 81aa | WT | SpydRec3-linker |
| | | dRec3 | | Nme2 | 81aa-WT Nme2 |

TABLE 10
Orthogonal Cas9-Cas9 fusion linker and Rec domain-
null mRNA and amount transfected in 96-well plates

| mRNA | size relative to SpyCas9 construct | total ng/well |
|---|---|---|
| mRNA E (SpyCas9) | 1 | 100 |
| mRNA A | 1.86 | 186 |
| mRNA N | 1.86 | 186 |
| mRNA O | 1.73 | 173 |
| mRNA P | 1.73 | 173 |
| mRNA Q | 1.72 | 172 |
| mRNA R | 1.71 | 171 |
| mRNA S | 1.71 | 171 |
| mRNA T | 1.70 | 170 |
| mRNA U | 1.69 | 169 |
| mRNA V | 1.65 | 165 |
| mRNA W | 1.59 | 159 |

[0752] Percent editing and excision at the PCSK9 locus by these guides is shown in Table 11 and FIGS. 3-4 for PMH and in Table 12 and FIGS. 5-6 for Hepa 1-6 cells.

TABLE 11
Percent editing and excision at the PCSK9 locus in PMH (n = 2 for all groups)

| | Spy | Nme | Spy indels | | Nme indels | | Excisions | | Indels in both | | Inversions | |
|---|---|---|---|---|---|---|---|---|---|---|---|---|
| mRNA | Guide | Guide | Mean | SD | Mean | SD | Mean | SD | Mean | SD | Mean | SD |
| mRNA E | G017879 | G017564 | 20.45 | 4.65 | 0.07 | 0.06 | 0.18 | 0.24 | 1.30 | 0.58 | 0.00 | 0.00 |
| mRNA A | | | 2.07 | 0.53 | 0.14 | 0.16 | 10.28 | 1.84 | 0.38 | 0.18 | 0.00 | 0.00 |
| mRNA N | | | 2.15 | 0.31 | 0.05 | 0.00 | 19.17 | 4.02 | 0.29 | 0.05 | 0.00 | 0.00 |
| mRNA O | | | 1.37 | 0.31 | 0.04 | 0.02 | 3.73 | 1.54 | 0.49 | 0.01 | 0.00 | 0.00 |
| mRNA P | | | 1.50 | 0.43 | 0.03 | 0.02 | 4.25 | 0.50 | 0.09 | 0.00 | 0.00 | 0.00 |
| mRNA Q | | | 2.68 | 1.76 | 0.09 | 0.09 | 4.04 | 2.23 | 0.47 | 0.07 | 0.00 | 0.00 |
| mRNA R | | | 1.76 | 0.17 | 0.05 | 0.08 | 3.88 | 0.93 | 0.37 | 0.14 | 0.00 | 0.00 |
| mRNA S | | | 1.76 | 0.09 | 0.05 | 0.00 | 4.62 | 0.97 | 0.73 | 0.26 | 0.00 | 0.00 |
| mRNA T | | | 1.21 | 1.02 | 0.32 | 0.39 | 2.18 | 2.45 | 2.86 | 3.35 | 0.00 | 0.00 |
| mRNA U | | | 2.95 | 0.35 | 0.18 | 0.04 | 1.20 | 0.66 | 0.30 | 0.20 | 0.00 | 0.00 |
| mRNA V | | | 0.59 | 0.03 | 0.65 | 0.27 | 1.20 | 0.14 | 0.14 | 0.02 | 0.00 | 0.00 |
| mRNA W | | | 0.30 | 0.14 | 0.65 | 0.20 | 0.15 | 0.04 | 0.02 | 0.00 | 0.00 | 0.00 |
| mRNA E | G017892 | G017564 | 21.67 | 0.18 | 0.01 | 0.01 | 0.09 | 0.13 | 0.34 | 0.03 | 0.00 | 0.00 |
| mRNA A | | | 0.37 | 0.01 | 0.59 | 0.22 | 2.11 | 0.51 | 0.24 | 0.00 | 0.00 | 0.00 |
| mRNA N | | | 2.15 | 0.56 | 0.01 | 0.01 | 16.02 | 1.96 | 0.39 | 0.01 | 0.12 | 0.00 |
| mRNA O | | | 0.06 | 0.01 | 0.07 | 0.10 | 0.36 | 0.07 | 0.13 | 0.05 | 0.00 | 0.00 |
| mRNA P | | | 0.11 | 0.11 | 0.18 | 0.03 | 0.81 | 0.50 | 0.07 | 0.04 | 0.00 | 0.00 |
| mRNA Q | | | 0.11 | 0.01 | 0.11 | 0.01 | 0.65 | 0.03 | 0.08 | 0.00 | 0.00 | 0.00 |
| mRNA R | | | 0.08 | 0.05 | 0.05 | 0.00 | 1.07 | 0.16 | 0.18 | 0.08 | 0.00 | 0.00 |
| mRNA S | | | 0.14 | 0.01 | 0.20 | 0.05 | 1.27 | 0.85 | 0.26 | 0.06 | 0.00 | 0.00 |
| mRNA T | | | 0.36 | 0.04 | 0.34 | 0.15 | 1.94 | 0.12 | 0.41 | 0.25 | 0.00 | 0.00 |
| mRNA U | | | 0.25 | 0.19 | 0.76 | 0.05 | 0.41 | 0.19 | 0.48 | 0.27 | 0.00 | 0.00 |
| mRNA V | | | 0.01 | 0.00 | 0.55 | 0.15 | 0.16 | 0.08 | 0.06 | 0.08 | 0.01 | 0.00 |
| mRNA W | | | 0.10 | 0.15 | 1.22 | 0.23 | 0.22 | 0.05 | 0.03 | 0.04 | 0.00 | 0.00 |
| mRNA E | G017893 | G017564 | 25.20 | 2.14 | 0.00 | 0.01 | 0.00 | 0.00 | 1.10 | 0.15 | 0.00 | 0.00 |
| mRNA A | | | 0.29 | 0.11 | 0.13 | 0.05 | 4.43 | 1.31 | 0.68 | 0.04 | 0.00 | 0.00 |
| mRNA N | | | 1.78 | 0.51 | 0.01 | 0.00 | 18.85 | 2.71 | 0.49 | 0.22 | 0.06 | 0.00 |
| mRNA O | | | 0.11 | 0.02 | 0.12 | 0.09 | 0.64 | 0.05 | 0.24 | 0.24 | 0.00 | 0.00 |
| mRNA P | | | 0.15 | 0.08 | 0.08 | 0.09 | 1.17 | 0.41 | 0.20 | 0.21 | 0.02 | 0.00 |
| mRNA Q | | | 0.30 | 0.02 | 0.01 | 0.00 | 0.97 | 0.32 | 0.09 | 0.12 | 0.00 | 0.00 |
| mRNA R | | | 0.22 | 0.07 | 0.09 | 0.10 | 1.43 | 0.18 | 0.35 | 0.30 | 0.00 | 0.00 |
| mRNA S | | | 0.25 | 0.11 | 0.17 | 0.07 | 0.50 | 0.17 | 0.20 | 0.19 | 0.00 | 0.00 |
| mRNA T | | | 0.72 | 0.24 | 0.35 | 0.02 | 0.22 | 0.09 | 0.57 | 0.30 | 0.00 | 0.00 |
| mRNA U | | | 0.66 | 0.25 | 0.42 | 0.12 | 0.13 | 0.12 | 0.48 | 0.23 | 0.00 | 0.00 |
| mRNA V | | | 0.22 | 0.02 | 0.39 | 0.07 | 0.69 | 0.14 | 0.13 | 0.15 | 0.00 | 0.00 |
| mRNA W | | | 0.03 | 0.02 | 0.92 | 0.46 | 0.00 | 0.00 | 0.08 | 0.11 | 0.00 | 0.00 |
| mRNA E | G017875 | G017565 | 29.68 | 2.65 | 0.71 | 0.82 | 0.00 | 0.00 | 0.03 | 0.01 | 0.00 | 0.00 |
| mRNA A | | | 0.20 | 0.29 | 0.85 | 0.77 | 0.32 | 0.45 | 0.11 | 0.16 | 0.00 | 0.00 |
| mRNA N | | | 10.14 | 1.08 | 0.32 | 0.03 | 6.99 | 2.59 | 0.67 | 0.10 | 0.06 | 0.00 |
| mRNA O | | | 0.02 | 0.02 | 0.32 | 0.40 | 0.00 | 0.00 | 0.00 | 0.00 | 0.00 | 0.00 |
| mRNA P | | | 0.29 | 0.41 | 0.24 | 0.28 | 0.00 | 0.00 | 0.00 | 0.00 | 0.00 | 0.00 |
| mRNA Q | | | 0.03 | 0.01 | 0.68 | 0.69 | 0.00 | 0.00 | 0.00 | 0.00 | 0.00 | 0.00 |
| mRNA R | | | 0.05 | 0.04 | 0.37 | 0.27 | 0.14 | 0.20 | 0.00 | 0.00 | 0.00 | 0.00 |
| mRNA S | | | 0.01 | 0.01 | 0.15 | 0.05 | 0.17 | 0.24 | 0.00 | 0.00 | 0.00 | 0.00 |
| mRNA T | | | 0.20 | 0.01 | 0.83 | 0.44 | 0.00 | 0.00 | 0.00 | 0.00 | 0.06 | 0.00 |
| mRNA U | | | 0.30 | 0.30 | 0.49 | 0.38 | 0.28 | 0.39 | 0.00 | 0.00 | 0.00 | 0.00 |
| mRNA V | | | 0.07 | 0.06 | 0.87 | 0.28 | 0.00 | 0.00 | 0.00 | 0.00 | 0.00 | 0.00 |
| mRNA W | | | 0.20 | 0.29 | 2.05 | 0.13 | 0.00 | 0.00 | 0.00 | 0.00 | 0.00 | 0.00 |
| mRNA E | G017877 | G017565 | 24.03 | 4.29 | 0.00 | 0.01 | 0.08 | 0.12 | 0.42 | 0.47 | 0.00 | 0.00 |
| mRNA A | | | 0.69 | 0.28 | 0.20 | 0.25 | 0.15 | 0.11 | 0.24 | 0.26 | 0.00 | 0.00 |
| mRNA N | | | 6.02 | 0.68 | 0.16 | 0.11 | 2.01 | 0.30 | 0.53 | 0.14 | 0.00 | 0.00 |
| mRNA O | | | 0.10 | 0.01 | 0.08 | 0.08 | 0.11 | 0.15 | 0.00 | 0.00 | 0.00 | 0.00 |
| mRNA P | | | 0.68 | 0.35 | 0.06 | 0.05 | 0.01 | 0.01 | 0.00 | 0.00 | 0.00 | 0.00 |
| mRNA Q | | | 0.61 | 0.18 | 0.04 | 0.04 | 0.03 | 0.04 | 0.14 | 0.19 | 0.00 | 0.00 |
| mRNA R | | | 0.60 | 0.54 | 0.13 | 0.08 | 0.00 | 0.00 | 0.17 | 0.23 | 0.00 | 0.00 |
| mRNA S | | | 0.28 | 0.04 | 0.02 | 0.02 | 0.00 | 0.00 | 0.17 | 0.01 | 0.00 | 0.00 |
| mRNA T | | | 0.39 | 0.08 | 0.04 | 0.04 | 0.06 | 0.07 | 0.11 | 0.13 | 0.00 | 0.00 |
| mRNA U | | | 0.75 | 0.50 | 0.19 | 0.13 | 0.04 | 0.05 | 0.17 | 0.18 | 0.00 | 0.00 |
| mRNA V | | | 0.04 | 0.03 | 0.28 | 0.18 | 0.07 | 0.10 | 0.09 | 0.12 | 0.00 | 0.00 |
| mRNA W | | | 0.01 | 0.01 | 0.38 | 0.38 | 0.00 | 0.00 | 0.13 | 0.19 | 0.00 | 0.00 |
| mRNA E | G017893 | G017565 | 22.52 | 0.34 | 0.00 | 0.01 | 0.07 | 0.10 | 0.68 | 0.69 | 0.00 | 0.00 |
| mRNA A | | | 0.31 | 0.24 | 0.07 | 0.04 | 3.14 | 0.60 | 0.43 | 0.37 | 0.00 | 0.00 |
| mRNA N | | | 1.23 | 0.40 | 0.03 | 0.02 | 16.15 | 3.06 | 0.83 | 0.29 | 0.01 | 0.00 |
| mRNA O | | | 0.11 | 0.08 | 0.06 | 0.03 | 0.75 | 0.02 | 0.10 | 0.11 | 0.00 | 0.00 |
| mRNA P | | | 0.18 | 0.04 | 0.02 | 0.02 | 0.89 | 0.32 | 0.43 | 0.00 | 0.00 | 0.00 |
| mRNA Q | | | 0.40 | 0.01 | 0.18 | 0.20 | 1.73 | 0.38 | 0.21 | 0.09 | 0.00 | 0.00 |
| mRNA R | | | 0.31 | 0.23 | 0.04 | 0.03 | 0.68 | 0.56 | 0.12 | 0.01 | 0.00 | 0.00 |
| mRNA S | | | 0.34 | 0.07 | 0.09 | 0.11 | 0.47 | 0.01 | 0.12 | 0.07 | 0.00 | 0.00 |
| mRNA T | | | 0.40 | 0.14 | 0.19 | 0.04 | 0.01 | 0.01 | 0.16 | 0.03 | 0.00 | 0.00 |
| mRNA U | | | 0.46 | 0.10 | 0.32 | 0.31 | 0.12 | 0.09 | 0.06 | 0.04 | 0.00 | 0.00 |
| mRNA V | | | 0.07 | 0.09 | 0.11 | 0.01 | 0.26 | 0.07 | 0.01 | 0.00 | 0.00 | 0.00 |
| mRNA W | | | 0.02 | 0.01 | 0.83 | 0.48 | 0.00 | 0.00 | 0.03 | 0.04 | 0.00 | 0.00 |

TABLE 12
Percent editing and excision at the PCSK9 locus in Hepa 1-6 cells (n = 2 for all groups)

| | | | Spy indels | | Nme indels | | Excisions | | Indels in both | | Inversions | |
|---|---|---|---|---|---|---|---|---|---|---|---|---|
| mRNA | Spy Guide | Nme Guide | Mean | SD | Mean | SD | Mean | SD | Mean | SD | Mean | SD |
| mRNA E | G017879 | G017564 | 46.64 | 19.31 | 0.01 | 0.01 | 0.12 | 0.11 | 8.87 | 4.17 | 0.04 | 0.00 |
| mRNA A | | | 4.71 | 0.20 | 0.63 | 0.03 | 39.61 | 4.09 | 6.62 | 1.39 | 0.10 | 0.00 |
| mRNA N | | | 9.14 | 0.24 | 0.17 | 0.03 | 44.75 | 4.08 | 8.59 | 1.03 | 0.12 | 0.00 |
| mRNA O | | | 7.12 | 1.82 | 0.65 | 0.11 | 29.54 | 4.60 | 4.44 | 1.68 | 0.01 | 0.00 |
| mRNA P | | | 5.50 | 0.41 | 0.79 | 0.13 | 27.63 | 0.23 | 5.14 | 0.68 | 0.04 | 0.00 |
| mRNA Q | | | 5.97 | 1.37 | 0.73 | 0.32 | 28.07 | 4.23 | 4.59 | 1.15 | 0.03 | 0.00 |
| mRNA R | | | 8.23 | 2.25 | 0.71 | 0.06 | 26.80 | 4.39 | 5.37 | 0.54 | 0.07 | 0.00 |
| mRNA S | | | 9.89 | 1.79 | 0.62 | 0.01 | 25.85 | 6.53 | 6.19 | 2.93 | 0.04 | 0.00 |
| mRNA T | | | 13.78 | 1.77 | 1.02 | 0.36 | 20.94 | 0.89 | 8.09 | 1.07 | 0.15 | 0.00 |
| mRNA U | | | 16.08 | 1.00 | 1.09 | 0.34 | 7.99 | 0.47 | 8.84 | 1.08 | 0.07 | 0.00 |
| mRNA V | | | 2.48 | 0.27 | 2.93 | 0.23 | 11.60 | 1.08 | 2.91 | 0.27 | 0.03 | 0.00 |
| mRNA W | | | 0.03 | 0.03 | 10.13 | 6.41 | 0.05 | 0.03 | 1.46 | 1.26 | 0.05 | 0.00 |
| mRNA E | G017892 | G017564 | 59.89 | 3.57 | 0.00 | 0.00 | 0.06 | 0.01 | 10.71 | 1.09 | 0.03 | 0.00 |
| mRNA A | | | 0.57 | 0.25 | 3.05 | 0.20 | 21.72 | 3.44 | 2.08 | 0.50 | 0.11 | 0.00 |
| mRNA N | | | 5.24 | 0.65 | 0.10 | 0.05 | 49.10 | 7.28 | 7.35 | 1.64 | 0.14 | 0.00 |
| mRNA O | | | 0.30 | 0.06 | 1.34 | 0.19 | 10.17 | 0.06 | 0.47 | 0.18 | 0.03 | 0.00 |
| mRNA P | | | 0.41 | 0.06 | 2.64 | 0.09 | 16.51 | 2.97 | 1.24 | 0.15 | 0.10 | 0.00 |
| mRNA Q | | | 0.49 | 0.00 | 2.79 | 1.07 | 18.80 | 3.65 | 1.46 | 0.50 | 0.05 | 0.00 |
| mRNA R | | | 0.59 | 0.00 | 2.79 | 0.66 | 25.73 | 4.04 | 1.92 | 0.61 | 0.04 | 0.00 |
| mRNA S | | | 0.65 | 0.14 | 3.15 | 0.57 | 25.81 | 3.18 | 2.06 | 0.34 | 0.11 | 0.00 |
| mRNA T | | | 0.62 | 0.03 | 4.14 | 0.39 | 22.19 | 1.14 | 2.16 | 0.06 | 0.05 | 0.00 |
| mRNA U | | | 0.55 | 0.06 | 5.25 | 0.84 | 7.60 | 0.71 | 1.37 | 0.29 | 0.06 | 0.00 |
| mRNA V | | | 0.09 | 0.02 | 5.25 | 1.13 | 2.12 | 0.58 | 1.17 | 0.12 | 0.01 | 0.00 |
| mRNA W | | | 0.01 | 0.01 | 16.38 | 1.91 | 0.05 | 0.05 | 2.63 | 0.56 | 0.00 | 0.00 |
| mRNA E | G017893 | G017564 | 49.29 | 8.63 | 0.01 | 0.01 | 0.16 | 0.13 | 20.10 | 3.20 | 0.12 | 0.00 |
| mRNA A | | | 1.09 | 0.41 | 2.97 | 1.28 | 30.89 | 12.84 | 4.60 | 2.21 | 0.09 | 0.00 |
| mRNA N | | | 5.68 | 1.27 | 0.12 | 0.06 | 52.28 | 5.43 | 11.79 | 1.10 | 0.14 | 0.00 |
| mRNA O | | | 0.54 | 0.05 | 1.26 | 0.28 | 11.29 | 2.40 | 1.08 | 0.40 | 0.01 | 0.00 |
| mRNA P | | | 0.93 | 0.20 | 2.46 | 0.07 | 20.21 | 2.51 | 2.72 | 0.91 | 0.09 | 0.00 |
| mRNA Q | | | 1.17 | 0.25 | 2.67 | 0.82 | 20.94 | 6.10 | 2.90 | 0.85 | 0.08 | 0.00 |
| mRNA R | | | 1.30 | 0.61 | 2.27 | 0.55 | 21.75 | 6.06 | 3.32 | 1.02 | 0.06 | 0.00 |
| mRNA S | | | 2.02 | 0.74 | 3.77 | 0.54 | 11.75 | 3.27 | 3.42 | 1.04 | 0.02 | 0.00 |
| mRNA T | | | 2.57 | 0.40 | 3.83 | 0.83 | 3.46 | 0.99 | 3.19 | 1.21 | 0.00 | 0.00 |
| mRNA U | | | 2.70 | 0.90 | 4.30 | 1.34 | 4.52 | 1.78 | 3.43 | 2.09 | 0.02 | 0.00 |
| mRNA V | | | 0.22 | 0.03 | 3.08 | 0.74 | 4.81 | 0.56 | 1.18 | 0.35 | 0.01 | 0.00 |
| mRNA W | | | 0.01 | 0.01 | 13.13 | 6.68 | 0.12 | 0.02 | 3.69 | 2.34 | 0.00 | 0.00 |
| mRNA E | G017875 | G017565 | 80.13 | 3.74 | 0.02 | 0.02 | 0.10 | 0.12 | 3.11 | 0.15 | 0.00 | 0.00 |
| mRNA A | | | 0.39 | 0.18 | 9.61 | 0.18 | 2.99 | 0.58 | 0.91 | 0.07 | 0.06 | 0.00 |
| mRNA N | | | 29.68 | 0.50 | 0.72 | 0.04 | 24.38 | 0.85 | 9.55 | 0.72 | 0.23 | 0.00 |
| mRNA O | | | 0.08 | 0.02 | 3.22 | 0.81 | 0.82 | 0.09 | 0.07 | 0.02 | 0.00 | 0.00 |
| mRNA P | | | 0.13 | 0.09 | 3.43 | 1.61 | 0.69 | 0.06 | 0.27 | 0.29 | 0.02 | 0.00 |
| mRNA Q | | | 0.25 | 0.11 | 4.60 | 0.11 | 1.05 | 0.53 | 0.31 | 0.17 | 0.01 | 0.00 |
| mRNA R | | | 0.29 | 0.12 | 6.53 | 1.18 | 1.97 | 0.86 | 0.48 | 0.26 | 0.02 | 0.00 |
| mRNA S | | | 0.37 | 0.01 | 6.99 | 0.05 | 1.97 | 0.37 | 0.47 | 0.28 | 0.00 | 0.00 |
| mRNA T | | | 0.18 | 0.01 | 4.49 | 0.88 | 1.27 | 0.48 | 0.30 | 0.13 | 0.00 | 0.00 |
| mRNA U | | | 0.26 | 0.20 | 6.66 | 0.21 | 1.09 | 0.37 | 0.33 | 0.05 | 0.00 | 0.00 |
| mRNA V | | | 0.02 | 0.02 | 6.99 | 1.45 | 0.02 | 0.02 | 0.30 | 0.27 | 0.02 | 0.00 |
| mRNA W | | | 0.04 | 0.02 | 8.47 | 0.20 | 0.00 | 0.00 | 0.42 | 0.23 | 0.00 | 0.00 |
| mRNA E | G017877 | G017565 | 59.48 | 0.52 | 0.01 | 0.00 | 0.32 | 0.25 | 21.60 | 0.48 | 0.02 | 0.00 |
| mRNA A | | | 7.16 | 2.91 | 3.83 | 1.43 | 7.67 | 3.03 | 6.33 | 4.22 | 0.06 | 0.00 |
| mRNA N | | | 30.46 | 3.12 | 0.41 | 0.07 | 12.88 | 0.70 | 17.72 | 1.52 | 0.10 | 0.00 |
| mRNA O | | | 3.80 | 0.36 | 1.41 | 0.11 | 1.87 | 0.05 | 1.52 | 0.30 | 0.01 | 0.00 |
| mRNA P | | | 3.86 | 0.74 | 1.24 | 0.19 | 1.84 | 0.77 | 2.06 | 0.35 | 0.00 | 0.00 |
| mRNA Q | | | 5.41 | 0.76 | 1.89 | 0.23 | 1.28 | 0.10 | 2.41 | 0.70 | 0.01 | 0.00 |
| mRNA R | | | 6.63 | 0.71 | 1.52 | 0.29 | 1.19 | 0.24 | 2.73 | 1.06 | 0.00 | 0.00 |
| mRNA S | | | 5.17 | 0.19 | 1.17 | 0.32 | 0.61 | 0.09 | 1.75 | 0.13 | 0.00 | 0.00 |
| mRNA T | | | 4.31 | 0.58 | 1.31 | 0.23 | 0.62 | 0.32 | 1.84 | 0.52 | 0.00 | 0.00 |
| mRNA U | | | 6.63 | 1.17 | 1.86 | 0.54 | 1.28 | 0.15 | 2.98 | 0.98 | 0.01 | 0.00 |
| mRNA V | | | 1.28 | 0.03 | 3.22 | 0.71 | 0.85 | 0.05 | 1.04 | 0.33 | 0.00 | 0.00 |
| mRNA W | | | 0.01 | 0.01 | 5.44 | 1.64 | 0.01 | 0.02 | 0.76 | 0.05 | 0.00 | 0.00 |
| mRNA E | G017893 | G017565 | 53.15 | 3.21 | 0.00 | 0.00 | 0.39 | 0.05 | 25.32 | 1.08 | 0.02 | 0.00 |
| mRNA A | | | 1.23 | 0.15 | 3.68 | 0.62 | 39.60 | 2.48 | 6.43 | 0.61 | 0.16 | 0.00 |
| mRNA N | | | 6.47 | 0.31 | 0.08 | 0.07 | 58.93 | 1.19 | 15.70 | 0.25 | 0.19 | 0.00 |
| mRNA O | | | 0.88 | 0.02 | 1.58 | 0.06 | 22.63 | 2.76 | 2.34 | 0.29 | 0.07 | 0.00 |
| mRNA P | | | 1.06 | 0.25 | 2.69 | 0.02 | 30.23 | 1.26 | 4.10 | 0.86 | 0.07 | 0.00 |
| mRNA Q | | | 1.08 | 0.09 | 2.09 | 0.33 | 27.52 | 2.30 | 3.24 | 1.10 | 0.10 | 0.00 |
| mRNA R | | | 1.36 | 0.05 | 2.50 | 0.14 | 30.57 | 0.55 | 3.99 | 0.55 | 0.09 | 0.00 |
| mRNA S | | | 1.65 | 0.23 | 3.21 | 0.14 | 17.30 | 0.21 | 3.15 | 0.14 | 0.07 | 0.00 |
| mRNA T | | | 2.24 | 0.04 | 3.37 | 0.47 | 3.14 | 0.50 | 2.78 | 0.96 | 0.04 | 0.00 |
| mRNA U | | | 3.13 | 0.34 | 4.60 | 0.72 | 3.76 | 0.05 | 3.22 | 0.63 | 0.05 | 0.00 |
| mRNA V | | | 0.30 | 0.16 | 4.43 | 0.47 | 9.50 | 1.90 | 2.42 | 0.47 | 0.02 | 0.00 |
| mRNA W | | | 0.02 | 0.02 | 9.84 | 0.06 | 0.05 | 0.03 | 2.57 | 0.66 | 0.00 | 0.00 |

[0753] Amino acid linkers were tested for expression efficacy in Hepa1-6 cells. Hepa1-6 cells were cultured in DMEM media supplemented with 10% fetal bovine serum at a density of 375,000 cells/well in a 6-well plate. Plated cells were agitated by shaking by hand every 15 minutes for 1 hour to ensure even distribution and then were allowed to settle and adhere overnight prior to transfection. Cells were transfected using 7.5 uL/well Lipofectamine Messenger Max (ThermoFisher, Cat. LMRNA001) diluted in OptiMem Medium (ThermoFisher, Cat. 31985062) according to the manufacturer's protocol, with, in each well, 2,500 ng SpyCas9 mRNA equivalents of a nuclease or orthogonal Cas9-Cas9 fusion construct as described in Table 13.

TABLE 13
Orthogonal Cas9-Cas9 fusion linker and Rec domain-null
mRNA and amount (ng) transfected in 6-well plates

| mRNA | size relative to Spy | total ng/well |
|---|---|---|
| mRNA A | 1.86 | 4640 |
| mRNA E (SpyCas9) | 1 | 2500 |
| mRNA N | 1.86 | 4640 |
| mRNA O | 1.73 | 4331 |
| mRNA P | 1.73 | 4314 |
| mRNA Q | 1.72 | 4297 |
| mRNA R | 1.71 | 4280 |
| mRNA S | 1.71 | 4263 |
| mRNA T | 1.70 | 4246 |
| mRNA U | 1.69 | 4229 |
| mRNA V | 1.65 | 4128 |
| mRNA W | 1.59 | 3986 |

[0754] Protein isolation and western blot analysis were performed as follows to measure orthogonal Cas9-Cas9 fusion and SpyCas9 expression in transfected cells. 72 hours post-treatment, cell plates were placed on ice and washed once with cold PBS, and then 60 uL/well of RIPA Lysis Buffer (Boston Bioproducts, Cat. BP-115) supplemented with 1× Protease Inhibitor (ThermoFisher, Cat. 1861278), 0.01M DTT (Cat. P2325), and 1× Benzonase Nuclease (EMD Millipore, Cat. 71206-25KUN) was added. Cells were scraped, lysates were pipetted up and down and left to incubate five minutes on ice. Lysates were moved to an Eppendorf tube and spun down in a tabletop centrifuge at 4° C. for 15 minutes at 13,000×g. Supernatant was collected in a fresh Eppendorf tube and protein was quantified using Pierce Coomassie Plus (Bradford) Assay Reagent (ThermoFisher, Cat. 23238) as follows. Pierce Coomassie Plus Protein Assay Reagent was brought to room temperature. 2 mg/mL albumin standard was serially diluted in equal volumes of PBS. Cell lysates were diluted 5-fold in PBS (4 uL cell lysate in 16 uL PBS). 5 μL of each standard or cell lysate sample was pipetted into a clear bottom polystyrene 96-well flat bottom plate in triplicates. 150 μL of Coomassie Plus Protein Assay Reagent was added to each well and mixed with a plate shaker for 30 seconds at room temperature. Plates were removed from the shaker and incubated for 10 minutes at room temperature. The absorbance at 595 nm was measured with a plate reader. Total protein quantification was used to calculate 40 ug/lane of each protein sample to run in a Novex WedgeWell 4-20% Tris-Glycine Gel (ThermoFisher, Cat. XP04205BOX) with 20× NUPAGE Tris-Acetate Running Buffer (ThermoFisher, Cat. LA0041). Samples were run on the gel for 1 hour at 150 volts with Chameleon Duo Pre-stained Protein Ladder (Licor, Cat. 928-60000) and transferred to a 0.45 m Nitrocellulose Membrane (ThermoFisher, Cat. 77010). The membrane was blocked in LiCor Odyssey Blocking Buffer (TBS) (LiCor, Cat. 927-60001) for 1 hour and incubated overnight at 4° C. with antibodies against SpyCas9 (Daigenode, Cat. 15310258) and GAPDH (GeneTex, Cat. GTX627408-01) diluted in 1:1 TBST and LiCor Blocking Buffer. The next morning, blots were washed in 1×TBST and incubated for 1 hour at room temperature with goat anti-rabbit IgG (LiCor, Cat. 926-32211) and goat anti-mouse (LiCor, Cat. 926-68070) diluted in 1:1 LiCor Blocking Buffer and TBST and imaged on the LiCor Odyssey Imager (FIG. 7). Truncated SpyCas9 products at 160 kDa were seen in lysates of cells transfected with mRNA A, mRNA N, mRNA O, mRNA P, mRNA Q. This 160 kDa truncated Spy product was reduced in lysates of cells transfected with mRNA R, mRNA S, mRNA T, and mRNA U, and the majority of the protein product is full-length orthogonal Cas9-Cas9 fusion. Results of the Western blot are shown FIG. 7, quantified in Table 14, and illustrated in FIG. 8.

TABLE 14
orthogonal Cas9-Cas9 fusion and SpyCas9 protein expression
in transfected Hepa 1-6 cells, normalized to GAPDH control.

| | Orthogonal Cas9-Cas9 fusion | SpyCas9 Signal |
|---|---|---|
| MRNA | Signal Normalized to GAPDH | Normalized to GAPDH |
| mRNA A | 0.06 | 0.03 |
| mRNA N | 0.03 | 0.02 |
| mRNA O | 0.01 | 0.01 |
| mRNA P | 0.01 | 0.02 |
| mRNA Q | 0.01 | 0.01 |
| mRNA R | 0.02 | 0.00 |
| mRNA S | 0.02 | 0.00 |
| mRNA T | 0.02 | 0.00 |
| mRNA U | 0.02 | 0.00 |

### Example 5—Orthogonal Cas9-Cas9 Fusion LNP Delivery with Nme:Spy Guide Ratio of 1:2 in PMH

[0755] Additional orthogonal Cas9-Cas9 fusion mRNA constructs were tested for excision efficacy with different LNP delivery conditions and different Nme:Spy guide ratios, in primary mouse hepatocytes (PMH) at the TTR locus.

[0756] PMH (Gibco, MCM882) were thawed and resuspended in 50 mL Cryopreserved Hepatocyte Recovery Media (CHRM) (Invitrogen, CM7000) followed by centrifugation. Cells were resuspended in hepatocyte medium with plating supplements: William's E Medium Plating Supplements with FBS content (Gibco, Cat. A13450). Cells were pelleted by centrifugation, resuspended in media and plated at a density of 15,000 cells/well on Bio-coat collagen I coated 96-well plates (Corning #354407). Plated cells were allowed to settle and adhere overnight in a tissue culture incubator at 37° C. and 5% CO₂ atmosphere. The next morning, cells were checked for monolayer formation, existing media was aspirated and cells were plated with 100 uL Cellartis Power Primary HEP Media (Takara, Cat. Y20020).

[0757] Cells were transfected with 2 LNPs prepared as described in Example 1, with a molar ratio of 50% Lipid A, 38% cholesterol, 9% DSPC, and 3% PEG2k-DMG, and delivered in Cellartis Power Primary HEP Media (Takara, Cat. Y20020). One LNP comprised an orthogonal Cas9-Cas9 fusion mRNA construct comprising any of SEQ ID NOs: 1 and 8 and the other LNP comprised both a SpyCas9 guide (SEQ ID NO: 201) and a NmeCas9 guide (SEQ ID NO: 252 or 253) in a weight ratio of Nme:Spy guide of 1:2. The volume ratio of gRNA:mRNA transfected to the cells was 2:1. Each well contained 10 ng of total RNA cargo, with 1.43 ng of orthogonal Cas9-Cas9 fusion mRNA, 5.72 ng SpyCas9 guide and 2.86 ng NmeCas9 guide. The orthogonal Cas9-Cas9 fusion constructs are described in Table 15.

[0758] DNA isolation and NGS analysis were performed as described in Example 1. Percent editing and excision at the TTR locus in the transfected cells are shown in Table 16 and illustrated in FIG. 9.

TABLE 15
mRNA sequences

| | SEQ | SpyCas9 | | NmeCas9 | Relative orientation |
|---|---|---|---|---|---|
| Construct | ID NO. | moiety | Linker | moiety | of nuclease moieties |
| mRNA A | 1 | R1333K | linker | WT | R1333K Spy-linker 81aa- |
| | | Spy | 81aa | Nme2 | WT Nme2-SV40NLS |
| mRNA B | 8 | R1333K | linker | WT | SV40NLS-WT Nme2- |
| | | Spy | 41aa | Nme2 | linker 41aa-R1333K Spy- |
| | | | | | SV40NLS-HiBit |

TABLE 16
Editing at the TTR locus as a percent of total
reads in Primary mouse hepatocytes (n = 2)

| | Nme2 indels | | Spy indels | | Excisions | | Indels in both | | Inversions | |
|---|---|---|---|---|---|---|---|---|---|---|
| mRNA | Mean | SD | Mean | SD | Mean | SD | Mean | SD | Mean | SD |
| mRNA A | 9.74 | 1.78 | 2.11 | 0.70 | 34.54 | 6.32 | 0.06 | 0.08 | 0.00 | 0.00 |
| mRNA B | 2.97 | 0.26 | 1.14 | 0.13 | 38.40 | 6.16 | 0.03 | 0.05 | 0.00 | 0.00 |

### Example 6—In Vivo Editing with Orthogonal Cas9-Cas9 Fusion Constructs in Mice

[0759] Two types of LNPs were formulated as described in Example 1, with a molar ratio of 50% Lipid A, 38% cholesterol, 9% DSPC, and 3% PEG2k-DMG. LNP1 designates LNPs that comprised two guide RNAs targeting the mouse TTR gene start codon, including one Nme2 sgRNA and one Spy sgRNA at a ratio of 1:2 Nme:Spy sgRNA by weight. LNP2 designates a second type of LNPs that comprised only mRNA. Transport and storage solution (TSS) used in LNP preparation was dosed in the experiment as a vehicle-only negative control.

[0760] orthogonal Cas9-Cas9 fusion systems (Spy sgRNA+Nme2 sgRNA+orthogonal Cas9-Cas9 fusion mRNA) were tested for editing efficiency in vivo using LNP1 and LNP2 species as described above. CD-1 female mice (N=5 animals in each group) about 6 weeks of age were used in the experiment and were weighed pre-dose. Animals received a lateral tail vein injection at a dose of 0.3 milligrams per kilogram body weight (e.g., 0.3 mg/kg, or 0.3 mpk) or 1 mg/kg of an LNP mixture comprising a ratio of 2:1 LNP1:LNP2 by volume. The animals were observed at approximately 24 hours post dose for adverse effects. Animals were euthanized 11 days post dose by cardiac exsanguination under isoflurane anesthesia and cervical dislocation. Blood was collected via cardiac puncture into serum separator tubes or into tubes containing buffered sodium citrate for plasma. Liver tissue was collected from the left lateral lobe from each animal for DNA extraction and NGS analysis as described in Example 1. Editing percentages are shown in Table 17 and illustrated in FIG. 10.

TABLE 17
Editing percentages in liver tissue.

| Group | Guide 1 | Guide 2 | | Dose | % Guide1 | | % Guide2 | | % | | % indels | | % | | |
|---|---|---|---|---|---|---|---|---|---|---|---|---|---|---|---|
| # | (Nme2) | (Spy) | mRNA | (mg/kg) | (Spy) | SD | (Nme2) | SD | Excisions | SD | in both | SD | Inversions | SD | N |
| 1 | TSS | X | X | X | 0.0 | 0.0 | 0.0 | 0.0 | 0.1 | 0.1 | 0.0 | 0 | 0.0 | 0 | 5 |
| 2 | G021846 | G000502 | mRNA | 0.3 | 3.1 | 0.4 | 2.2 | 0.2 | 56.8 | 3.7 | 0.5 | 0.2 | 0.0 | 0 | 5 |
| 3 | | | A | 1.0 | 4.4 | 0.5 | 1.9 | 0.2 | 60.7 | 3.0 | 0.8 | 0.1 | 0.0 | 0 | 5 |
| 4 | G023420 | | | 0.3 | 4.2 | 0.6 | 3.9 | 0.7 | 52.8 | 2.1 | 0.7 | 0.4 | 0.0 | 0 | 5 |
| 5 | | | | 1.0 | 5.6 | 0.8 | 3.0 | 0.5 | 55.2 | 2.9 | 1.2 | 0.6 | 0.0 | 0 | 5 |
| 6 | G21846 | | mRNA | 0.3 | 1.1 | 0.1 | 2.0 | 0.4 | 52.8 | 0.9 | 0.4 | 0.1 | 0.0 | 0.1 | 5 |
| 7 | | | B | 1.0 | 1.5 | 0.1 | 1.6 | 0.1 | 60.9 | 3.1 | 0.7 | 0.3 | 0.0 | 0 | 5 |
| 8 | G023420 | | | 0.3 | 1.0 | 0.2 | 3.8 | 0.5 | 49.3 | 6.6 | 0.4 | 0.1 | 0.0 | 0 | 5 |
| 9 | | | | 1.0 | 1.7 | 0.3 | 3.8 | 0.4 | 56.6 | 1.4 | 0.9 | 0.1 | 0.0 | 0.0 | 5 |

[0761] The total serum TTR levels were determined using a Prealbumin (TTR) ELISA Kit, Mouse (Aviva Systems; cat #OKIA00111) (N=5 animals in each group). Kit reagents and standards were prepared according to the manufacturer's protocol. Mouse serum was diluted between 10,000 to 50,000-fold. Both standard curve dilutions (100 μL each) and diluted serum samples were added to each well of the ELISA plate pre-coated with capture antibody. The plate was incubated at room temperature for 30 minutes before washing. Enzyme-antibody conjugate (100 μL per well) was added for a 20-minute incubation. Unbound antibody conjugate was removed and the plate was washed again before the addition of the chromogenic substrate solution. The plate was incubated for 10 minutes before adding 100 μL of the stop solution, e.g., sulfuric acid (approximately 0.3 M). The plate was read on a SpectraMax M5 or Clariostar plate reader at an absorbance of 450 nm. Serum TTR levels were calculated by SoftMax Pro software ver. 6.4.2 or Mars software ver. 3.31 using a four-parameter logistic curve fit off the standard curve. Final serum values were adjusted for the assay dilution. Serum TTR levels compared to the control group, which consisted of animals sham-treated with vehicle (TSS), are shown in Table 18 and illustrated in FIGS. 11A and 11B.

TABLE 18
Serum TTR analysis.

| | | | | | Serum | | | |
|---|---|---|---|---|---|---|---|---|
| Group | Guide 1 | Guide 2 | | Dose | TTR | SD | | % |
| # | (Nme2) | (Spy) | mRNA | (mg/kg) | (ug/ml) | (ug/ml) | N | TSS |
| 1 | TSS | X | X | X | 891.8 | 135.0 | 5 | 100.0 |
| 2 | G021846 | G000502 | mRNA | 0.3 | 112.2 | 51.2 | 5 | 12.6 |
| 3 | | | A | 1.0 | 40.9 | 7.0 | 5 | 4.6 |
| 4 | G023420 | | | 0.3 | 136.3 | 20.6 | 5 | 15.3 |
| 5 | | | | 1.0 | 46.8 | 10.6 | 5 | 5.2 |
| 6 | G021846 | | mRNA | 0.3 | 112.1 | 44.8 | 5 | 12.6 |
| 7 | | | B | 1.0 | 14.6 | 4.1 | 5 | 1.6 |
| 8 | G023420 | | | 0.3 | 157.3 | 86.7 | 5 | 17.6 |
| 9 | | | | 1.0 | 28.7 | 5.9 | 5 | 3.2 |

### Example 7—In Vivo Editing with Orthogonal Cas9-Cas9 Fusion Constructs in Mice

[0762] Two types of LNPs were formulated as described in Example 1, with a molar ratio of 50% Lipid A, 38% cholesterol, 9% DSPC, and 3% PEG2k-DMG. LNP1 designates LNPs that comprised a Nme2 sgRNA (SEQ ID NO: 252), a Spy sgRNA (SEQ ID NO: 201), or both a Nme2 sgRNA and a Spy sgRNA (SEQ ID NOs: 252 and 201) at a ratio of 1:2 Nme2 sgRNA:Spy sgRNA by weight. The sgRNA used in this experiment targeted the mouse TTR gene start codon. LNP2 designates a second type of LNPs that comprised only mRNA. Transport and storage solution (TSS) used in LNP preparation was dosed in the experiment as a vehicle-only negative control.

[0763] Editing efficiency was tested in vivo using LNP1 and LNP2 species as described above. CD-1 female mice (N=5 animals in each group) about 6 weeks of age were used in the experiment and were weighed pre-dose. Animals received a lateral tail vein injection at a dose of 0.1 milligrams per kilogram body weight (e.g., 0.1 mg/kg, or 0.1 mpk) or 0.3 mg/kg of a LNP mixture comprising a ratio of 2:1 LNP1:LNP2 by volume, unless otherwise specified. The animals were observed at approximately 24 hours post dose for adverse effects. Animals were euthanized 6 days post dose by cardiac exsanguination under isoflurane anesthesia and cervical dislocation. Blood was collected via cardiac puncture into serum separator tubes or into tubes containing buffered sodium citrate for plasma. Liver tissue was collected from the left lateral lobe from each animal for DNA extraction and NGS analysis as described in Example 1. Editing percentages from the mRNA sequences described in Table 19 are shown in Table 20 and illustrated in FIG. 12.

TABLE 19
mRNA sequences

| | SEQ | SpyCas9 | | NmeCas9 | Relative orientation |
|---|---|---|---|---|---|
| Construct | ID NO. | moiety | Linker | moiety | of nuclease moieties |
| mRNA A | 1 | R1333K | linker | WT Nme2 | R1333K Spy-linker 81aa- |
| | | Spy | 81aa | | WT Nme2-SV40NLS |
| mRNA B | 8 | R1333K | linker | WT Nme2 | SV40NLS-WT Nme2-linker |
| | | Spy | 41aa | | 41aa-R1333K Spy- |
| | | | | | SV40NLS-HiBit |
| mRNA C | 11 | R1333K | linker | WT Nme2 | WT Nme2-linker 41aa- |
| | | Spy | 41aa | | R1333K Spy-SV40NLS-HiBit |

TABLE 20
Editing percentages in liver tissue (N = 5 for all groups).

| Guide | | | Dose | % Guide1 | | % Guide | | % | | % indels | | % | |
|---|---|---|---|---|---|---|---|---|---|---|---|---|---|
| RNA | mRNA | gRNA:mRNA | (mg/kg) | (Spy) | SD | 2 (Nme2) | SD | Excisions | SD | in both | SD | Inversion | SD |
| TSS | − | − | − | 0.01 | 0.0 | 0.0 | 0.0 | 0.1 | 0.1 | 0.0 | 0.0 | 0.0 | 0.0 |
| G021846/ | mRNA | 2:1 | 0.1 | 2.4 | 0.5 | 3.2 | 0.7 | 26.1 | 2.3 | 0.1 | 0.1 | 0.1 | 0.2 |
| G000502 | A | | 0.3 | 3.8 | 0.6 | 5.1 | 0.7 | 44.6 | 2.7 | 0.2 | 0.3 | 0.1 | 0.3 |
| | mRNA | | 0.1 | 1.8 | 0.8 | 0.6 | 0.2 | 24.8 | 8.7 | 0.0 | 0.0 | 0.0 | 0.0 |
| | B | | 0.3 | 4.0 | 0.4 | 1.3 | 0.2 | 46.2 | 2.1 | 0.1 | 0.1 | 0.1 | 0.1 |
| | mRNA | | 0.1 | 0.1 | 0.0 | 0.1 | 0.1 | 0.9 | 0.4 | 0.0 | 0.0 | 0.0 | 0.0 |
| | C | | 0.3 | 0.9 | 0.3 | 0.3 | 0.2 | 7.9 | 3.8 | 0.1 | 0.1 | 0.0 | 0.0 |
| G021846 | mRNA | | 0.1 | 0.0 | 0.0 | 0.3 | 0.1 | 0.0 | 0.0 | 0.0 | 0.0 | 0.0 | 0.0 |
| | C | | | | | | | | | | | | |
| G0000502 | mRNA | | 0.1 | 0.1 | 0.1 | 0.0 | 0.0 | 0.0 | 0.0 | 0.0 | 0.0 | 0.0 | 0.0 |
| | C | | | | | | | | | | | | |
| G021846 | Nme2 | | 0.1 | 0.1 | 0.1 | 21.2 | 1.7 | 0.0 | 0.0 | 0.2 | 0.1 | 0.0 | 0.0 |
| | control | | | | | | | | | | | | |
| G000502 | Spy | 1:2 | 0.1 | 49.4 | 12.6 | 0.0 | 0.0 | 0.0 | 0.0 | 0.0 | 0.0 | 0.0 | 0.0 |
| | Control | | | | | | | | | | | | |

[0764] The total serum TTR levels were determined using a Prealbumin (TTR) ELISA Kit, Mouse (Aviva Systems; cat #OKIA00111) (N=5 animals in each group). Kit reagents and standards were prepared according to the manufacturer's protocol. Mouse serum was diluted between 10000 to 50000-fold. Both standard curve dilutions (100 μL each) and diluted serum samples were added to each well of the ELISA plate pre-coated with capture antibody. The plate was incubated at room temperature for 30 minutes before washing. Enzyme-antibody conjugate (100 μL per well) was added for a 20-minute incubation. Unbound antibody conjugate was removed and the plate was washed again before the addition of the chromogenic substrate solution. The plate was incubated for 10 minutes before adding 100 μL of the stop solution, e.g., sulfuric acid (approximately 0.3 M). The plate was read on a SpectraMax M5 or Clariostar plate reader at an absorbance of 450 nm. Serum TTR levels were calculated by SoftMax Pro software ver. 6.4.2 or Mars software ver. 3.31 using a four-parameter logistic curve fit off the standard curve. Final serum values were adjusted for the assay dilution. Serum TTR levels compared to the control group, which consisted of animals sham-treated with vehicle (TSS), are shown in Table 21 and illustrated in FIGS. 13A and 13B.

TABLE 21
Serum TTR analysis.

| | | | | Serum | | | |
|---|---|---|---|---|---|---|---|
| | | | Dose | TTR | | | |
| Guide RNA | mRNA | gRNA:mRNA | (mg/kg) | ug/ml | SD | N | % TSS |
| TSS | − | − | − | 1059.5 | 172.1 | 5 | 100 |
| G021846/ | mRNA | 2:1 | 0.1 | 654.6 | 157.3 | 5 | 61.8 |
| G000502 | A | | 0.3 | 301.3 | 51.2 | 5 | 28.4 |
| | mRNA | | 0.1 | 827.4 | 253.6 | 5 | 78.1 |
| | B | | 0.3 | 289.7 | 102.1 | 5 | 27.3 |
| | mRNA | | 0.1 | 1466.0 | 433.1 | 5 | 138.4 |
| | C | | 0.3 | 1079.8 | 158.7 | 5 | 101.9 |
| G021846 | mRNA | | 0.1 | 1458.4 | 286.9 | 5 | 137.6 |
| | C | | | | | | |
| G000502 | mRNA | | 0.1 | 1867.9 | 476.0 | 5 | 176.3 |
| | C | | | | | | |
| G021846 | Nme2 | | 0.1 | 724.8 | 252.5 | 5 | 68.4 |
| | control | | | | | | |
| G000502 | Spy | 1:2 | 0.1 | 453.8 | 93.8 | 5 | 42.8 |
| | Control | | | | | | |

### Example 8—Editing and Expression of Full-Length Intein-Mediated Split Orthogonal Cas9-Cas9 Fusion mRNA

[0765] Intein-mediated split orthogonal Cas9-Cas9 fusion mRNA was tested to measure editing in transfected cells. Primary mouse hepatocytes, PMH (Gibco, MC882), were thawed and resuspended in 50 mL Cryopreserved Hepatocyte Recovery Media (CHRM) (Invitrogen, CM7000) followed by centrifugation. Cells were resuspended in hepatocyte medium with plating supplements: William's E Medium Plating Supplements with FBS content (Gibco, Cat. A13450). Cells were pelleted by centrifugation, resuspended in media and plated at a density of 15,000 cells/well on Bio-coat collagen I coated 96-well plates (Corning #354407). Plated cells were allowed to settle overnight in a tissue culture incubator at 37° C. and 5% CO₂ atmosphere. The next morning, cells were checked for monolayer formation, existing media was aspirated and cells were plated with 100 uL Cellartis Power Primary HEP Medium (Takara Bio, Cat no. Y20020) prior to transfection.

[0766] Lipofection of cells with mRNA and gRNAs used pre-mixed lipid formulations as described in Example 1. The lipofection reagent contained ionizable Lipid A, cholesterol, DSPC, and PEG2k-DMG in a molar ratio of 50% Lipid A, 38% cholesterol, 9% DSPC, and 3% PEG2k-DMG. This mixture was reconstituted in 100% ethanol then mixed with RNA (e.g., Cas9 mRNA and gRNA) at a lipid amine to RNA phosphate (N:P) molar ratio of about 6 to produce lipid nucleic acid assemblies.

[0767] Orthogonal Cas9-Cas9 fusion mRNAs are described in Table 22. Lipofections were performed using, in each well, 180 ng orthogonal Cas9-Cas9 fusion mRNA A equivalents of a mRNA construct as described in Table 23, 25 nM SpyCas9 guide (SEQ ID NO: 201) and 25 nM NmeCas9 guide (SEQ ID NO: 250). Different ratios of Spy Intein mRNA to Nme2 Intein mRNA for orthogonal Cas9-Cas9 fusion were tested as follows: 1:1, 2:1, 3:1, 4:1, 5:1, 1:2, and 1:3 for a total of 180 ng total equivalents of orthogonal Cas9-Cas9 fusion mRNA A. Briefly, cells were incubated at 37° C., 5% CO2 for 24 hours prior to treatment with the lipid nucleic acid mixtures. Lipid nucleic acid mixtures were incubated in media containing 10% fetal bovine serum (FBS) at 37° C. for 5 minutes. Post-incubation, the lipid nucleic acid mixtures were added to the cells as indicated above. The cells were lysed 5 days post-treatment and NGS analysis was performed as described in Example 1. Table 24 and FIG. 14 show editing in cells transfected with Spy intein mRNA H and Nme2 intein mRNA G. Table 25 and FIG. 15 show editing in cells transfected with Spy intein mRNA I and Nme2 intein mRNA J.

TABLE 22
mRNA sequences

| | SEQ | SpyCas9 | | NmeCas9 | Relative orientation |
|---|---|---|---|---|---|
| Construct | ID NO. | moiety | Linker | moiety | of nuclease moieties |
| mRNA A | 1 | R1333K | linker | WT | R1333K Spy-linker 81aa- |
| | | Spy | 81aa | Nme2 | WT Nme2-SV40NLS |
| | | | SEQ ID | | |
| | | | NO: 150 | | |
| mRNA B | 8 | R1333K | linker | WT | SV40NLS-WT Nme2-linker |
| | | Spy | 41aa | Nme2 | 41aa-R1333K Spy- |
| | | | SEQ ID | | SV40NLS-HiBit |
| | | | NO: 154 | | |
| mRNA F | 20 | none | none | WT | WT Nme2 |
| (Nme2Cas9) | | | | Nme2 | |
| mRNA G | 23 | none | linker | WT | SV40NLS-Nucleoplasmin- |
| (Nme2Cas9 | | | 81aa | Nme2 | WT Nme2-linker 81 aa - |
| intein) | | | SEQ ID | | NpuN |
| | | | NO: 158 | | |
| mRNA H | 16 | R1333K | none | none | NpuC-R1333K Spy- |
| (SpyCas9 | | Spy | | | SV40NLS |
| intein) | | | | | |
| mRNA I | 19 | R1333K | none | none | SV40NLS-R1333K Spy- |
| (SpyCas9 | | Spy | | | NpuN |
| intein) | | | | | |
| mRNA J | 22 | none | linker | WT | NpuC- linker 81 aa - |
| (Nme2Cas9 | | | 81aa | Nme2 | WT Nme2-SV40NLS |
| intein) | | | SEQ ID | | |
| | | | NO: 158 | | |
| mRNA K | 25 | WT Spy | none | none | WT Spy-HiBit |
| (SpyCas9) | | | | | |

TABLE 23
Transfected mRNA

| mRNA | size relative to mRNA A | ng/well |
|---|---|---|
| mRNA A | 1 | 180.00 |
| mRNA B | 1.00 | 179.22 |
| mRNA F | 0.43 | 77.98 |
| mRNA G | 0.47 | 84.68 |
| mRNA H | 0.56 | 100.26 |
| mRNA I | 0.58 | 105.26 |
| mRNA J | 0.46 | 83.55 |
| mRNA K | 0.58 | 104.23 |

TABLE 24
Editing in transfected cells (n = 3 for all groups)

| mRNA | Spy indels | | Nme2 indels | | Excisions | | Indels in both | | Inversions | |
|---|---|---|---|---|---|---|---|---|---|---|
| condition | Mean | SD | Mean | SD | Mean | SD | Mean | SD | Mean | SD |
| mRNA A | 2.55 | 0.77 | 14.88 | 1.16 | 45.09 | 4.86 | 1.17 | 0.21 | 0.01 | 0.01 |
| mRNA B | 3.54 | 0.62 | 20.60 | 0.70 | 58.10 | 2.58 | 3.17 | 0.98 | 0.00 | 0.00 |
| mRNA F | 0.01 | 0.01 | 87.50 | 1.67 | 0.02 | 0.03 | 2.26 | 1.22 | 0.00 | 0.00 |
| mRNA K | 90.31 | 2.19 | 0.01 | 0.01 | 0.03 | 0.03 | 1.10 | 0.39 | 0.00 | 0.00 |
| mRNA H | 0.68 | 0.17 | 0.01 | 0.01 | 0.00 | 0.00 | 0.00 | 0.00 | 0.00 | 0.00 |
| mRNA G | 0.02 | 0.02 | 3.24 | 0.19 | 0.00 | 0.00 | 0.01 | 0.01 | 0.00 | 0.00 |
| 1:1 mRNA | 4.40 | 0.32 | 17.51 | 3.06 | 43.04 | 6.49 | 2.42 | 0.38 | 0.01 | 0.01 |
| H:mRNA G | | | | | | | | | | |
| 2:1 mRNA | 1.05 | 0.37 | 3.84 | 0.24 | 7.17 | 1.28 | 0.32 | 0.05 | 0.00 | 0.00 |
| H:mRNA G | | | | | | | | | | |
| 3:1 mRNA | 1.67 | 1.06 | 2.20 | 0.16 | 5.84 | 1.39 | 0.11 | 0.09 | 0.00 | 0.00 |
| H:mRNA G | | | | | | | | | | |
| 4:1 mRNA | 2.24 | 0.42 | 4.22 | 0.63 | 13.92 | 1.31 | 0.16 | 0.24 | 0.00 | 0.01 |
| H:mRNA G | | | | | | | | | | |
| 5:1 mRNA | 4.89 | 1.42 | 7.34 | 0.44 | 21.20 | 2.62 | 0.83 | 0.69 | 0.00 | 0.00 |
| H:mRNA G | | | | | | | | | | |
| 1:2 mRNA | 1.58 | 0.30 | 8.63 | 1.30 | 9.98 | 2.64 | 0.35 | 0.06 | 0.00 | 0.00 |
| H:mRNA G | | | | | | | | | | |
| 1:3 mRNA | 1.70 | 0.70 | 15.27 | 2.59 | 15.31 | 5.33 | 1.06 | 0.54 | 0.00 | 0.00 |
| H:mRNA G | | | | | | | | | | |

TABLE 25
Editing in transfected cells (n = 3 for all groups)

| mRNA | Spy indels | | Nme2 indels | | Excisions | | Indels in both | | Inversions | |
|---|---|---|---|---|---|---|---|---|---|---|
| condition | Mean | SD | Mean | SD | Mean | SD | Mean | SD | Mean | SD |
| mRNA A | 2.55 | 0.77 | 14.88 | 1.16 | 45.09 | 4.86 | 1.17 | 0.21 | 0.01 | 0.01 |
| mRNA B | 3.54 | 0.62 | 20.60 | 0.70 | 58.10 | 2.58 | 3.17 | 0.98 | 0.00 | 0.00 |
| mRNA F | 0.01 | 0.01 | 87.50 | 1.67 | 0.02 | 0.03 | 2.26 | 1.22 | 0.00 | 0.00 |
| mRNA K | 90.31 | 2.19 | 0.01 | 0.01 | 0.03 | 0.03 | 1.10 | 0.39 | 0.00 | 0.00 |
| mRNA I | 0.03 | 0.05 | 0.00 | 0.01 | 0.00 | 0.00 | 0.00 | 0.00 | 0.00 | 0.00 |
| mRNA J | 0.02 | 0.02 | 54.16 | 1.65 | 0.00 | 0.00 | 1.08 | 0.08 | 0.01 | 0.02 |
| 1:1 mRNA | 0.05 | 0.07 | 51.32 | 1.11 | 1.75 | 0.27 | 1.27 | 0.86 | 0.00 | 0.00 |
| I:mRNA J | | | | | | | | | | |
| 2:1 mRNA | 0.06 | 0.05 | 24.64 | 6.08 | 0.56 | 0.26 | 0.32 | 0.11 | 0.00 | 0.00 |
| I:mRNA J | | | | | | | | | | |
| 3:1 mRNA | 0.07 | 0.05 | 13.28 | 0.86 | 1.00 | 0.39 | 0.24 | 0.24 | 0.00 | 0.00 |
| I:mRNA J | | | | | | | | | | |
| 4:1 mRNA | 0.32 | 0.36 | 33.04 | 1.17 | 2.65 | 1.28 | 0.26 | 0.26 | 0.00 | 0.00 |
| I:mRNA J | | | | | | | | | | |
| 5:1 mRNA | 0.21 | 0.12 | 30.63 | 3.49 | 2.87 | 1.08 | 0.52 | 0.33 | 0.00 | 0.00 |
| I:mRNA J | | | | | | | | | | |
| 1:2 mRNA | 0.03 | 0.05 | 60.63 | 6.39 | 0.74 | 0.07 | 0.95 | 0.22 | 0.00 | 0.00 |
| I:mRNA J | | | | | | | | | | |
| 1:3 mRNA | 0.05 | 0.06 | 81.30 | 2.68 | 2.97 | 0.59 | 1.95 | 0.12 | 0.16 | 0.27 |
| I:mRNA J | | | | | | | | | | |

[0768] In addition, intein-mediated split orthogonal Cas9-Cas9 fusion mRNA was tested to measure the expression of full-length orthogonal Cas9-Cas9 fusion protein in transfected cells. Primary mouse hepatocytes, PMH (Gibco, MC883), were thawed and resuspended in 50 mL Cryopreserved Hepatocyte Recovery Media (CHRM) (Invitrogen, CM7000) followed by centrifugation. Cells were resuspended in hepatocyte medium with plating supplements: William's E Medium Plating Supplements with FBS content (Gibco, Cat. A13450). Cells were pelleted by centrifugation, resuspended in media and plated at a density of 350,000 cells/well on Bio-coat collagen I coated 6-well plates (Corning #356400). Plated cells were agitated by shaking the plate by hand every 15 minutes for 1 hour to ensure even distribution and then were allowed to settle and adhere overnight in a tissue culture incubator at 37° C. and 5% CO₂ atmosphere. After incubation cells were checked for monolayer formation, existing media was aspirated and cells were plated with 2 mL hepatocyte maintenance medium: William's E Medium (Gibco, Cat. A12176-01) plus supplement pack (Gibco, Cat. CM3000). Cells were transfected later that day according to the manufacturer's protocol with 7.5 uL Lipofectamine Messenger Max (ThermoFisher, Cat. LMRNA001) diluted in OptiMem Medium (ThermoFisher, Cat. 31985062). Each well contained 4640 ng orthogonal Cas9-Cas9 fusion mRNA A equivalents of a mRNA construct, as described in Table 26.

[0769] Different ratios of Spy Intein mRNA H to Nme2 Intein mRNA G were tested as follows: 1:1, 2:1, 3:1, 4:1, 5:1, 1:2, and 1:3 for a total of 4640 ng total equivalents of orthogonal Cas9-Cas9 fusion mRNA A. Protein isolation and western blot analysis were performed as follows. 24 hours post-treatment, cell plates were placed on ice and washed once with cold PBS, and then 50 uL/well of RIPA Lysis Buffer (Boston Bioproducts, Cat. BP-115) supplemented with 1× Protease Inhibitor (ThermoFisher, Cat. 1861278), 0.01M DTT (Cat. P2325), and 1× Benzonase Nuclease (EMD Millipore, Cat. 71206-25KUN). Cells were scraped, lysates were pipetted up and down and left to incubate five minutes on ice. Lysates were moved to an Eppendorf tube and spun down in a tabletop centrifuge at 4° C. for 15 minutes at 13,000×g. Supernatant was collected in a fresh Eppendorf tube. 8 uL/lane of each protein sample was run in a Bolt 8% Bis-Tris Plus gel (ThermoFisher, Cat. NW00085BOX) with 20×MOPS Running Buffer (ThermoFisher, Cat. NP0001). Samples were run on the gel for 1 hour at 150 volts with Chameleon Duo Pre-stained Protein Ladder (Licor, Cat. 928-60000) and transferred to a 0.45 m Nitrocellulose Membrane (ThermoFisher, Cat. 77010). The membrane was blocked in LiCor Odyssey Blocking Buffer (TBS) (LiCor, Cat. 927-60001) for 1 hour and incubated overnight at 4° C. with antibodies against SpyCas9 (Daigenode, Cat. 15310258) and GAPDH (GeneTex, Cat. GTX627408-01) diluted in 1:1 TB ST and LiCor Blocking Buffer. The next morning, blots were washed in X TBST and incubated for 1 hour at room temperature with goat anti-rabbit IgG (LiCor, Cat. 926-32211) and goat anti-mouse (LiCor, Cat. 926-68070) diluted in 1:1 LiCor Blocking Buffer and TBST and imaged on the LiCor Odyssey Imager (FIG. 16). Table 27 shows the percentage orthogonal Cas9-Cas9 fusion protein expression of total Spy protein expression detected in the Western blot.

TABLE 26
Transfected mRNA

| mRNA | Size relative to 1265 | Total ng/well |
|---|---|---|
| mRNA A | 1 | 4640.0 |
| mRNA B | 1.00 | 4620.0 |
| mRNA F | 0.43 | 2010.1 |
| mRNA G | 0.47 | Ratio dependent |
| mRNA H | 0.56 | Ratio dependent |
| mRNA I | 0.58 | Ratio dependent |
| mRNA J | 0.46 | Ratio dependent |
| mRNA K | 0.58 | 2686.8 |

TABLE 27
orthogonal Cas9-Cas9 fusion protein expression (%) of
total Spy protein expression detected in Western blot

| | | Orthogonal Cas9-Cas9 fusion |
|---|---|---|
| Sample | mRNA condition | (% of total Spy signal) |
| 1 | mRNA A orthogonal Cas9-Cas9 | 96 |
| | fusion | |
| 2 | mRNA B orthogonal Cas9-Cas9 | 96 |
| | fusion | |
| 3 | mRNA H SpyCas9 Intein | 1 |
| 4 | mRNA I SpyCas9 Intein | 4 |
| 5 | mRNA K SpyCas9 | 5 |
| 6 | 1:1 mRNA H:mRNA G | 43 |
| 7 | 1:1 mRNA H:mRNA F | 4 |
| 8 | 2:1 mRNA H:mRNA G | 31 |
| 9 | 3:1 mRNA H:mRNA G | 24 |
| 10 | 4:1 mRNA H:mRNA G | 27 |
| 11 | 5:1 mRNA H:mRNA G | 26 |
| 12 | 1:2 mRNA H:mRNA G | 51 |
| 13 | 1:3 mRNA H:mRNA G | 49 |

### Example 9—Excision with Exemplary Spy Cas9 and Nme Cas9 Guide Designs

[0770] Additional guide scaffolds were tested for excision efficacy in primary mouse hepatocytes (PMH) at the PCSK9 locus. Primary mouse hepatocytes, PMH (Gibco, MCM855), were thawed and resuspended in Cryopreserved Hepatocyte Recovery Media (CHRM) (Invitrogen, CM7000) followed by centrifugation. Cells were resuspended in hepatocyte medium with plating supplements: William's E Medium Plating Supplements with FBS content (Gibco, Cat. A13450). Cells were pelleted by centrifugation, resuspended in media and plated at a density of 15,000 cells/well on Bio-coat collagen I coated 96-well plates (Corning #354407). Plated cells were allowed to settle and adhere for 4-6 hours in a tissue culture incubator at 37° C. and 5% CO₂ atmosphere. After incubation cells were checked for monolayer formation, existing media was aspirated and cells were plated with 100 uL hepatocyte maintenance medium: William's E Medium (Gibco, Cat. A12176-01) plus supplement pack (Gibco, Cat. CM3000) and left to adhere overnight prior to transfection. Lipofection of cells with mRNA and gRNAs used pre-mixed lipid formulations as described in Example 1. The lipofection reagent contained ionizable Lipid A, cholesterol, DSPC, and PEG2k-DMG in a molar ratio of 50% Lipid A, 38% cholesterol, 9% DSPC, and 3% PEG2k-DMG. This mixture was reconstituted in 100% ethanol then mixed with RNA (e.g., Cas9 mRNA and gRNA) at a lipid amine to RNA phosphate (N:P) molar ratio of about 6 to produce lipid nucleic acid assemblies.

[0771] Lipofections were performed using orthogonal Cas9-Cas9 fusion mRNA A (SEQ ID NO: 1), Nme guide G020362, and either Spy guide G018723 or G018726. Equivalent amounts of Nme and Spy gRNAs were used at total ratio of gRNA to mRNA of 1:2 by weight. Briefly, cells were incubated at 37° C., 5% CO2 overnight prior to treatment with the lipid nucleic acid mixtures. Lipid nucleic acid mixtures were incubated in media containing 10% fetal bovine serum (FBS) at 37° C. for 5 minutes. Post-incubation, the lipid nucleic acid mixtures were added to the cells at 723 ng Cas9 mRNA (100 nM of each gRNA). The cells were lysed 5 days post-treatment and NGS analysis was performed as described in Example 1. Table 28 and FIG. 17 show editing data in PMH.

TABLE 28
Mean percent editing in PMH

| | Spy indels | | Nme2 indels | | Excisions | | Indels in both | | Inversions | |
|---|---|---|---|---|---|---|---|---|---|---|
| Sample | Mean | SD | Mean | SD | Mean | SD | Mean | SD | Mean | SD |
| G018723 | 1.69 | 0.28 | 0.66 | 0.36 | 12.10 | 1.71 | 0.12 | 0.14 | 0.00 | 0.00 |
| G018726 | 0.43 | 0.04 | 0.44 | 0.26 | 5.00 | 0.43 | 0.33 | 0.33 | 0.07 | 0.00 |

### Example 10—Excision with Exemplary Spy Cas9 and Nme Cas9 Guide Designs

[0772] Additional guide scaffolds were tested for excision efficacy in Hepa1-6 cells. Cells were cultured in DMEM media supplemented with 10% fetal bovine serum at a density of 15,000 cells/well in a 96-well plate and left to adhere overnight prior to transfection. Cells were transfected according to the manufacturer's protocol with 0.6 uL/well Lipofectamine Messenger Max (ThermoFisher, Cat. LMRNA001) diluted in OptiMem Medium (ThermoFisher, Cat. 31985062). Each well contained 100 ng SpyCas9 mRNA equivalents of orthogonal Cas9-Cas9 fusion or Nme2Cas9 mRNA as described in Table 29, 50 nM SpyCas9 guide and 50 nM NmeCas9 guide. For Cas9 controls, 50 nM of only the species appropriate guide was used. DNA isolation and NGS analysis were performed as described in Example 1. Table 30 shows percent editing at the PCSK9 locus by these guides. FIG. 18 shows percent editing at the PCSK9 locus by Spy guides and SpyCas9. FIG. 19 shows percent editing at the PSCK9 locus by Nme guides and Nme2Cas9. FIG. 20 shows percent editing at the PSCK9 locus by Spy guides and orthogonal Cas9-Cas9 fusion. FIG. 21 shows percent editing at the PSCK9 locus by Nme guides and orthogonal Cas9-Cas9 fusion. FIG. 22 shows percent editing at the PSCK9 locus by Spy guides and Nme guide G017566 and orthogonal Cas9-Cas9 fusion. FIG. 23 shows percent editing at the PSCK9 locus by Spy guides and Nme guide G017564 and orthogonal Cas9-Cas9 fusion.

TABLE 29
Nuclease mRNA amounts used in PMH transfection

| mRNA Alias | size relative to Spy | total ng/well |
|---|---|---|
| mRNA A | 1.86 | 186 |
| mRNA F (Nme2 Cas9) | 0.88 | 88 |
| mRNA X (Spy Cas9) | 1 | 100 |

TABLE 30
Percent editing at the PCSK9 locus by these guides (n = 2 for all groups)

| | Spy | Nme2 | Spy indel | | Nme indel | | Excisions | | Indels in both | | Inversions | |
|---|---|---|---|---|---|---|---|---|---|---|---|---|
| mRNA | guide | guide | Mean | SD | Mean | SD | Mean | SD | Mean | SD | Mean | SD |
| SpyCas9 | G017875 | none | 71.52 | 3.92 | 0.28 | 0.35 | 0.02 | 0.03 | 1.45 | 0.85 | 0.00 | 0.00 |
| mRNA X | G017876 | | 74.30 | 2.79 | 0.01 | 0.02 | 0.05 | 0.00 | 8.88 | 1.18 | 0.00 | 0.00 |
| | G017877 | | 59.76 | 6.87 | 0.01 | 0.01 | 0.36 | 0.01 | 20.20 | 1.68 | 0.00 | 0.00 |
| | G017879 | | 63.28 | 5.08 | 0.01 | 0.00 | 0.21 | 0.08 | 14.73 | 2.97 | 0.04 | 0.04 |
| | G017881 | | 70.68 | 8.10 | 0.03 | 0.00 | 0.08 | 0.01 | 6.59 | 0.61 | 0.05 | 0.05 |
| | G017892 | | 61.97 | 6.32 | 0.01 | 0.02 | 0.15 | 0.07 | 8.27 | 2.46 | 0.01 | 0.02 |
| | G017893 | | 48.74 | 6.07 | 0.01 | 0.00 | 0.58 | 0.21 | 23.24 | 4.12 | 0.05 | 0.05 |
| | G017896 | | 69.13 | 5.96 | 0.00 | 0.00 | 0.01 | 0.02 | 8.54 | 1.09 | 0.00 | 0.00 |
| Nme2Cas9 | none | G017566 | 0.00 | 0.00 | 71.49 | 2.95 | 0.05 | 0.05 | 9.78 | 0.84 | 0.00 | 0.00 |
| mRNA F | | G017564* | 0.00 | | 66.11 | | 0.01 | | 7.59 | | 0.00 | |
| orthogonal Cas9- | none | G017566 | 0.02 | 0.03 | 45.58 | 2.87 | 0.00 | 0.00 | 5.89 | 2.15 | 0.01 | 0.02 |
| Cas9 fusion mRNA A | | G017564 | 0.02 | 0.02 | 36.90 | 12.35 | 0.00 | 0.00 | 5.23 | 2.25 | 0.03 | 0.05 |
| orthogonal Cas9- | G017875 | none | 1.79 | 0.03 | 0.07 | 0.03 | 0.00 | 0.00 | 0.00 | 0.00 | 0.00 | 0.00 |
| Cas9 fusion mRNA A | G017876 | | 2.56 | 0.86 | 0.06 | 0.05 | 0.04 | 0.05 | 0.20 | 0.07 | 0.00 | 0.00 |
| | G017877 | | 44.11 | 2.72 | 0.08 | 0.10 | 0.32 | 0.09 | 12.87 | 1.07 | 0.01 | 0.01 |
| | G017879 | | 62.92 | 3.06 | 0.01 | 0.00 | 0.13 | 0.06 | 12.48 | 1.63 | 0.02 | 0.02 |
| | G017881 | | 15.14 | 1.17 | 0.01 | 0.01 | 0.01 | 0.01 | 0.76 | 0.06 | 0.00 | 0.00 |
| | G017892 | | 5.42 | 0.50 | 0.01 | 0.02 | 0.01 | 0.01 | 0.61 | 0.18 | 0.01 | 0.01 |
| | G017893 | | 24.31 | 1.44 | 0.02 | 0.00 | 0.37 | 0.10 | 8.22 | 1.24 | 0.05 | 0.02 |
| | G017896 | | 68.15 | 2.79 | 0.00 | 0.01 | 0.01 | 0.02 | 5.10 | 0.27 | 0.00 | 0.00 |
| orthogonal Cas9- | G017875 | G017566 | 0.30 | 0.00 | 37.76 | 6.17 | 4.64 | 0.81 | 6.18 | 0.50 | 0.02 | 0.02 |
| Cas9 fusion mRNA A | G017876 | | 0.65 | 0.05 | 31.27 | 0.74 | 11.40 | 0.19 | 12.30 | 2.41 | 0.07 | 0.03 |
| | G017877 | | 8.69 | 0.78 | 11.98 | 0.94 | 12.39 | 0.03 | 29.93 | 0.82 | 0.11 | 0.06 |
| | G017879 | | 8.61 | 0.23 | 1.13 | 0.02 | 51.50 | 2.52 | 22.95 | 0.72 | 0.26 | 0.12 |
| | G017881 | | 1.34 | 0.20 | 24.29 | 4.28 | 27.60 | 4.64 | 11.24 | 3.58 | 0.11 | 0.02 |
| | G017892 | | 0.83 | 0.05 | 17.91 | 2.15 | 45.77 | 1.53 | 10.31 | 1.07 | 0.19 | 0.00 |
| | G017893 | | 1.20 | 0.13 | 12.40 | 1.86 | 47.73 | 1.26 | 20.04 | 1.05 | 0.24 | 0.08 |
| | G017896 | | 3.43 | 0.15 | 13.16 | 2.46 | 25.63 | 1.14 | 38.67 | 6.62 | 0.34 | 0.04 |
| orthogonal Cas9- | G017875 | G017564 | 0.15 | 0.14 | 33.50 | 5.57 | 3.90 | 0.18 | 3.97 | 4.32 | 0.06 | 0.09 |
| Cas9 fusion mRNA A | G017876 | | 0.72 | 0.08 | 30.61 | 2.25 | 10.41 | 0.57 | 11.01 | 0.03 | 0.07 | 0.02 |
| | G017877 | | 9.88 | 0.21 | 12.00 | 0.18 | 9.74 | 1.20 | 27.42 | 4.13 | 0.10 | 0.03 |
| | G017879 | | 8.77 | 0.54 | 1.01 | 0.11 | 51.72 | 0.65 | 21.52 | 1.59 | 0.11 | 0.05 |
| | G017881 | | 1.45 | 0.13 | 21.19 | 2.28 | 26.04 | 3.18 | 9.18 | 1.25 | 0.08 | 0.04 |
| | G017892 | | 1.04 | 0.01 | 16.86 | 2.22 | 41.48 | 4.55 | 10.17 | 1.29 | 0.24 | 0.03 |
| | G017893 | | 1.92 | 0.05 | 10.90 | 0.86 | 42.13 | 2.82 | 18.87 | 4.51 | 0.09 | 0.13 |
| | G017896 | | 15.74 | 0.36 | 3.27 | 0.32 | 23.95 | 2.19 | 34.86 | 4.04 | 0.13 | 0.07 |

*= only one replicate

### Example 11—Excision with Exemplary Spy Cas9 and Nme Cas9 Guide Designs

[0773] Additional guide scaffolds were tested for excision efficacy in primary mouse hepatocytes (PMH) at the TTR locus. Primary mouse hepatocytes, PMH (Gibco, MC855), were thawed and resuspended in 50 mL Cryopreserved Hepatocyte Recovery Media (CHRM) (Invitrogen, CM7000) followed by centrifugation. Cells were resuspended in hepatocyte medium with plating supplements: William's E Medium Plating Supplements with FBS content (Gibco, Cat. A13450). Cells were pelleted by centrifugation, resuspended in media and plated at a density of 15,000 cells/well on Bio-coat collagen I coated 96-well plates (Corning #354407). Plated cells were allowed to settle and adhere for 4-6 hours in a tissue culture incubator at 37° C. and 5% CO₂ atmosphere. After incubation cells were checked for monolayer formation, existing media was aspirated and cells were plated with 100 uL hepatocyte maintenance medium: William's E Medium (Gibco, Cat. A12176-01) plus supplement pack (Gibco, Cat. CM3000) and left to adhere overnight prior to transfection.

[0774] Cells were transfected according to the manufacturer's protocol with 0.3 uL/well Lipofectamine Messenger Max (ThermoFisher, Cat. LMRNA001) diluted in OptiMem Medium (ThermoFisher, Cat. 31985062). Orthogonal Cas9-Cas9 fusion mRNA constructs are described in Table 31. Each well contained 100 ng SpyCas9 equivalents of mRNA constructs as described in Table 32, 50 nM Spy Cas9 guide and 50 nM NmeCas9 guide.

TABLE 31
mRNA sequences

| | SEQ | SpyCas9 | | NmeCas9 | Relative orientation |
|---|---|---|---|---|---|
| Construct | ID NO. | moiety | Linker | moiety | of nuclease moieties |
| mRNA A | 1 | R1333K | linker 81aa | WT Nme2 | R1333K Spy-linker 81aa- |
| | | Spy | SEQ ID NO: 150 | | WT Nme2-SV40NLS |
| mRNA L | 38 | R1333K | linker 81aa | WT Nme2 | R1333K Spy-linker 81aa - |
| | | Spy | SEQ ID NO: 158 | | WT Nme2-SV40NLS |

TABLE 32
Nuclease mRNA amounts used in PMH transfection

| mRNA | total ng/well |
|---|---|
| mRNA A | 186 |
| mRNA L | 186 |
| mRNA F (Nme2Cas9) | 88 |

[0775] Some cells were transfected with 100 ng SpyCas9 mRNA equivalents of orthogonal Cas9-Cas9 fusion mRNA or Nme mRNA, and only 50 nM NmeCas9 guide RNA. Cells were incubated for 4 days after editing. DNA isolation and NGS analysis were performed as described in Example 1. Percent editing at the TTR locus in transfected cells is indicated in Tables 33 and 34. Percent editing in cells transfected with orthogonal Cas9-Cas9 fusion mRNA, Spy guides and Nme guide G021275 is illustrated in FIG. 24. Percent editing in cells transfected with orthogonal Cas9-Cas9 fusion mRNA, Spy guides and Nme guide G021320 is illustrated in FIG. 25. Percent editing in cells transfected with orthogonal Cas9-Cas9 fusion mRNA and Nme guides is illustrated in FIG. 26. Percent editing in cells transfected with NmeCas9 mRNA and Nme guides is illustrated in FIG. 27.

TABLE 33
Mean percent editing of orthogonal Cas9-Cas9 fusion, Nme guide
and Spy guide at the TTR locus in PMH (n = 2 for all groups)

| Nme | | Spy | Spy Indels | | Nme2 Indels | | Excision | | Indels in both | | Inversions | |
|---|---|---|---|---|---|---|---|---|---|---|---|---|
| gRNA | mRNA | gRNA | Mean | SD | Mean | SD | Mean | SD | Mean | SD | Mean | SD |
| G021275 | mRNA A | G000603 | 1.29 | 0.02 | 2.99 | 0.93 | 34.46 | 1.30 | 0.99 | 0.15 | 0.41 | 0.01 |
| | | G000606 | 0.26 | 0.22 | 12.76 | 0.11 | 2.50 | 1.18 | 0.36 | 0.21 | 0.00 | 0.00 |
| | | G009577 | 2.24 | 0.36 | 3.58 | 0.43 | 17.57 | 2.86 | 1.43 | 0.86 | 0.15 | 0.05 |
| | | G016128 | 0.07 | 0.10 | 16.81 | 4.98 | 0.09 | 0.13 | 0.25 | 0.15 | 0.00 | 0.00 |
| | | G016133 | 1.47 | 0.46 | 1.54 | 0.56 | 60.53 | 2.58 | 1.17 | 0.34 | 0.01 | 0.02 |
| | | G016138 | 0.61 | 0.29 | 16.90 | 1.46 | 15.60 | 2.71 | 0.87 | 0.30 | 0.07 | 0.10 |
| | | G016139 | 0.01 | 0.01 | 37.25 | 5.63 | 0.44 | 0.11 | 0.20 | 0.04 | 0.00 | 0.00 |
| | | G016145 | 0.07 | 0.09 | 15.29 | 3.40 | 0.07 | 0.09 | 0.07 | 0.09 | 0.00 | 0.00 |
| | | G016146 | 0.14 | 0.20 | 12.47 | 0.70 | 1.01 | 0.25 | 0.22 | 0.10 | 0.00 | 0.00 |
| | | G016148 | 0.06 | 0.09 | 3.22 | 0.13 | 35.68 | 0.59 | 0.33 | 0.01 | 0.02 | 0.02 |
| | | G016157 | 1.43 | 0.75 | 4.90 | 0.88 | 25.16 | 6.61 | 0.71 | 0.27 | 0.58 | 0.12 |
| | | G016163 | 2.17 | 0.15 | 3.50 | 1.27 | 28.92 | 5.18 | 0.98 | 0.30 | 1.01 | 0.42 |
| | | G016164 | 0.00 | 0.00 | 3.76 | 0.36 | 52.71 | 4.20 | 0.24 | 0.34 | 0.21 | 0.16 |
| | mRNA L | G000603 | 1.79 | 0.02 | 3.53 | 0.40 | 41.24 | 8.57 | 0.89 | 0.24 | 0.23 | 0.33 |
| | | G000606 | 0.44 | 0.62 | 7.75 | 6.21 | 1.12 | 0.79 | 0.53 | 0.49 | 0.00 | 0.00 |
| | | G009577 | 1.42 | 0.68 | 5.70 | 0.55 | 25.60 | 3.13 | 1.81 | 0.54 | 0.25 | 0.09 |
| | | G016128 | 0.00 | 0.00 | 15.61 | 3.72 | 0.00 | 0.00 | 0.04 | 0.06 | 0.00 | 0.00 |
| | | G016133 | 1.39 | 1.46 | 1.50 | 2.12 | 38.86 | 21.39 | 0.43 | 0.60 | 0.07 | 0.10 |
| | | G016138 | 0.45 | 0.64 | 8.82 | 5.20 | 7.48 | 0.33 | 0.09 | 0.13 | 0.00 | 0.00 |
| | | G016139 | 0.15 | 0.21 | 19.50 | 1.06 | 0.19 | 0.15 | 0.00 | 0.00 | 0.00 | 0.00 |
| | | G016145 | 0.31 | 0.43 | 16.49 | 1.84 | 0.09 | 0.12 | 1.23 | 1.74 | 0.00 | 0.00 |
| | | G016146 | 0.00 | 0.00 | 11.28 | 4.17 | 1.68 | 0.19 | 0.36 | 0.51 | 0.00 | 0.00 |
| | | G016148 | 0.05 | 0.07 | 1.82 | 0.79 | 40.16 | 3.24 | 0.55 | 0.11 | 0.00 | 0.00 |
| | | G016157 | 1.06 | 0.10 | 4.56 | 0.31 | 32.60 | 13.25 | 0.32 | 0.23 | 0.33 | 0.24 |
| | | G016163 | 1.86 | 0.40 | 4.19 | 1.45 | 35.35 | 4.16 | 0.92 | 0.41 | 1.12 | 0.66 |
| | | G016164 | 0.00 | 0.00 | 4.67 | 0.26 | 40.10 | 20.13 | 0.20 | 0.04 | 0.27 | 0.38 |
| G021320 | mRNA A | G000267 | 0.65 | 0.32 | 2.65 | 0.23 | 53.01 | 2.06 | 0.08 | 0.12 | 0.00 | 0.00 |
| | | G000502 | 0.28 | 0.05 | 4.39 | 0.58 | 56.00 | 0.04 | 0.27 | 0.11 | 0.00 | 0.00 |
| | | G014304 | 0.36 | 0.02 | 3.84 | 0.74 | 54.36 | 8.67 | 0.13 | 0.06 | 0.00 | 0.00 |
| | | G014317 | 0.01 | 0.00 | 27.49 | 0.95 | 0.34 | 0.13 | 0.08 | 0.11 | 0.00 | 0.00 |
| | | G014322 | 0.00 | 0.01 | 29.46 | 0.21 | 0.03 | 0.04 | 0.02 | 0.03 | 0.00 | 0.00 |
| | | G014323 | 0.04 | 0.01 | 14.90 | 1.98 | 46.61 | 4.84 | 0.22 | 0.32 | 0.00 | 0.00 |
| | | G014325 | 0.01 | 0.00 | 22.10 | 0.17 | 0.00 | 0.00 | 0.24 | 0.29 | 0.00 | 0.00 |
| | | G014326 | 0.10 | 0.03 | 2.33 | 0.02 | 56.97 | 2.04 | 0.07 | 0.10 | 0.01 | 0.00 |
| | mRNA L | G000267 | 0.24 | 0.18 | 3.03 | 0.49 | 43.35 | 3.18 | 0.05 | 0.07 | 0.01 | 0.01 |
| | | G000502 | 0.21 | 0.29 | 2.57 | 2.04 | 30.16 | 23.21 | 0.09 | 0.12 | 0.00 | 0.00 |
| | | G014304 | 0.45 | 0.22 | 3.68 | 0.34 | 43.00 | 1.28 | 0.02 | 0.03 | 0.00 | 0.00 |
| | | G014317 | 0.02 | 0.00 | 11.26 | 1.36 | 0.00 | 0.00 | 0.13 | 0.19 | 0.00 | 0.00 |
| | | G014322 | 0.01 | 0.01 | 15.10 | 8.65 | 0.00 | 0.00 | 0.00 | 0.00 | 0.00 | 0.00 |
| | | G014323 | 0.02 | 0.00 | 10.18 | 2.24 | 32.37 | 0.84 | 0.35 | 0.25 | 0.00 | 0.00 |
| | | G014325 | 0.01 | 0.01 | 17.78 | 2.40 | 0.00 | 0.00 | 0.00 | 0.00 | 0.00 | 0.00 |
| | | G014326 | 0.23 | 0.23 | 2.51 | 0.01 | 52.45 | 1.95 | 0.10 | 0.14 | 0.00 | 0.00 |

TABLE 34
Mean percent editing of orthogonal Cas9-Cas9 fusion and Nme with
Nme guide only at the TTR locus in PMH (n = 2 for all groups)

| | Nme | Spy indels | | Nme2 indels | | Excisions | | Indels in both | | Inversions | |
|---|---|---|---|---|---|---|---|---|---|---|---|
| Nuclease | guide | Mean | SD | Mean | SD | Mean | SD | Mean | SD | Mean | SD |
| Orthogonal | G021320 | 0.00 | 0.00 | 36.80 | 6.58 | 0.00 | 0.00 | 0.14 | 0.20 | 0.00 | 0.00 |
| Cas9-Cas9 | G021237 | 0.01 | 0.01 | 28.97 | 7.74 | 0.02 | 0.03 | 0.15 | 0.12 | 0.00 | 0.00 |
| fusion | G021247 | 0.01 | 0.02 | 26.92 | 8.48 | 0.00 | 0.00 | 0.00 | 0.00 | 0.00 | 0.00 |
| mRNA A | G021275 | 0.01 | 0.02 | 34.30 | 7.64 | 0.04 | 0.05 | 0.25 | 0.09 | 0.00 | 0.00 |
| | G021256 | 0.01 | 0.00 | 30.89 | 0.48 | 0.01 | 0.01 | 0.07 | 0.06 | 0.00 | 0.00 |
| | G021238 | 0.02 | 0.00 | 16.19 | 2.09 | 0.00 | 0.00 | 0.00 | 0.00 | 0.00 | 0.00 |
| Orthogonal | G021320 | 0.01 | 0.00 | 45.31 | 8.64 | 0.00 | 0.00 | 0.39 | 0.31 | 0.00 | 0.00 |
| Cas9-Cas9 | G021237 | 0.01 | 0.00 | 40.24 | 7.31 | 0.00 | 0.00 | 0.09 | 0.11 | 0.00 | 0.00 |
| fusion | G021247 | 0.05 | 0.07 | 30.26 | 8.97 | 0.00 | 0.00 | 0.00 | 0.00 | 0.00 | 0.00 |
| mRNA L | G021275 | 0.02 | 0.03 | 32.13 | 5.18 | 0.07 | 0.10 | 0.11 | 0.16 | 0.00 | 0.00 |
| | G021256 | 0.00 | 0.00 | 34.68 | 2.70 | 0.05 | 0.07 | 0.26 | 0.37 | 0.00 | 0.00 |
| | G021238 | 0.03 | 0.01 | 16.46 | 2.23 | 0.00 | 0.00 | 0.00 | 0.01 | 0.00 | 0.00 |
| Nme2Cas9 | G021320 | 0.00 | 0.00 | 70.82 | 6.70 | 0.14 | 0.05 | 1.56 | 0.60 | 0.00 | 0.00 |
| mRNA F | G021237 | 0.01 | 0.00 | 68.64 | 3.14 | 0.08 | 0.01 | 0.74 | 0.95 | 0.00 | 0.00 |
| | G021247 | 0.02 | 0.03 | 70.18 | 2.19 | 0.00 | 0.00 | 0.26 | 0.17 | 0.00 | 0.00 |
| | G021275 | 0.00 | 0.00 | 71.31 | 5.80 | 0.06 | 0.01 | 1.30 | 0.16 | 0.00 | 0.00 |
| | G021256 | 0.00 | 0.00 | 74.97 | 4.93 | 0.36 | 0.10 | 1.39 | 0.02 | 0.00 | 0.00 |
| | G021238 | 0.01 | 0.00 | 63.80 | 3.43 | 0.09 | 0.13 | 0.71 | 0.10 | 0.00 | 0.00 |

### Example 12—Excision with Exemplary Spy Cas9 and Nme Cas9 Guide Designs

[0776] Additional guide scaffolds were tested for excision efficacy in primary mouse hepatocytes (PMH) at the TTR locus. Primary mouse hepatocytes, PMH (IVAL MCM114), were thawed and resuspended in 50 mL Cryopreserved Hepatocyte Recovery Media (CHRM) (Invitrogen, CM7000) followed by centrifugation. Cells were resuspended in hepatocyte medium with plating supplements: William's E Medium Plating Supplements with FBS content (Gibco, Cat. A13450). Cells were pelleted by centrifugation, resuspended in media and plated at a density of 15,000 cells/well on Bio-coat collagen I coated 96-well plates (Corning #354407). Plated cells were allowed to settle and adhere for 4-6 hours in a tissue culture incubator at 37° C. and 5% CO₂ atmosphere. After incubation cells were checked for monolayer formation, existing media was aspirated and cells were plated with 100 uL Cellartis Power Primary HEP Medium (Takara, Cat. Y20020) and left to adhere overnight prior to transfection. Cells were transfected with two LNPs prepared as described in Example 1, with a molar ratio of 50% Lipid A, 38% cholesterol, 9% DSPC, and 3% PEG2k-DMG, and delivered in Cellartis Power Primary HEP Media (Takara, Cat. Y20020) in an 8-point 3-fold dose response curve starting at 100 ng of total RNA cargo per well. One LNP comprised one guide RNA or two guide RNAs in a 1:1 weight ratio, and the second LNP comprised a nuclease mRNA. The volume ratio of gRNA:mRNA transfected to the cells was 2:1.

[0777] Cells were incubated for 5 days after editing. DNA isolation and NGS analysis were performed as described in Example 1. Percent editing and excision with orthogonal Cas9-Cas9 fusion constructs are shown in Table 35 and illustrated in FIG. 28 and FIG. 29. Percent editing with SpyCas9 and NmeCas9 constructs are shown in Table 36 and illustrated in FIG. 30, FIG. 31, and FIG. 32.

TABLE 35
Mean percent editing and excision with orthogonal Cas9-Cas9 fusion at the TTR locus in PMH (n = 2)

| | Spy | Nme | Total | Spy indels | | Nme2 indels | | Excisions | | Indels in both | | Inversions | |
|---|---|---|---|---|---|---|---|---|---|---|---|---|---|
| Nuclease | Guide | Guide | ng LNP | Mean | SD | Mean | SD | Mean | SD | Mean | SD | Mean | SD |
| Orthogonal | G000502 | G021845 | 100.00 | 0.10 | 0.15 | 2.36 | 0.85 | 95.23 | 0.33 | 1.36 | 0.56 | 0.00 | 0.00 |
| Cas9-Cas9 | | | 33.30 | 0.29 | 0.13 | 17.64 | 0.09 | 78.28 | 1.12 | 2.34 | 0.95 | 0.00 | 0.00 |
| fusion | | | 11.11 | 1.85 | 0.68 | 25.97 | 3.23 | 54.60 | 9.82 | 1.74 | 0.48 | 0.00 | 0.00 |
| mRNA A | | | 3.70 | 1.20 | 0.41 | 11.49 | 1.39 | 21.13 | 1.50 | 0.48 | 0.22 | 0.00 | 0.00 |
| | | | 1.23 | 0.18 | 0.05 | 2.00 | 0.53 | 5.45 | 2.29 | 0.05 | 0.08 | 0.00 | 0.00 |
| | | | 0.41 | 0.01 | 0.01 | 0.20 | 0.03 | 0.50 | 0.24 | 0.04 | 0.06 | 0.00 | 0.00 |
| | | | 0.14 | 0.01 | 0.01 | 0.03 | 0.01 | 0.02 | 0.00 | 0.04 | 0.06 | 0.00 | 0.00 |
| | | | 0.00 | 0.01 | 0.01 | 0.03 | 0.01 | 0.00 | 0.00 | 0.00 | 0.00 | 0.00 | 0.00 |
| | | G021846 | 100.00 | 0.04 | 0.06 | 1.57 | 0.51 | 96.02 | 0.85 | 1.77 | 0.08 | 0.00 | 0.00 |
| | | | 33.30 | 0.28* | N/A | 15.36* | N/A | 81.7*8 | N/A | 1.28* | N/A | 0.00* | N/A |
| | | | 11.11 | 1.04 | 0.51 | 38.77 | 1.74 | 51.89 | 2.17 | 2.04 | 1.08 | 0.00 | 0.00 |
| | | | 3.70 | 1.73 | 0.50 | 28.65 | 0.59 | 27.02 | 6.29 | 1.14 | 0.46 | 0.00 | 0.00 |
| | | | 1.23 | 0.47 | 0.27 | 7.37 | 1.58 | 7.81 | 1.28 | 0.08 | 0.07 | 0.00 | 0.00 |
| | | | 0.41 | 0.14 | 0.12 | 1.49 | 0.76 | 1.22 | 0.69 | 0.00 | 0.00 | 0.00 | 0.00 |
| | | | 0.14 | 0.03 | 0.03 | 0.28 | 0.13 | 0.06 | 0.09 | 0.00 | 0.00 | 0.00 | 0.00 |
| | | | 0.00 | 0.01 | 0.01 | 0.01 | 0.01 | 0.00 | 0.00 | 0.00 | 0.00 | 0.00 | 0.00 |

*= only one replicate

TABLE 36
Mean percent editing with Spy or NmeCas9 at the TTR locus in PMH (n = 2)

| | Spy | Nme | Total | Spy indels | | Nme2 indels | | Excisions | | Indels in both | | Inversions | |
|---|---|---|---|---|---|---|---|---|---|---|---|---|---|
| Nuclease | Guide | Guide | ng LNP | Mean | SD | Mean | SD | Mean | SD | Mean | SD | Mean | SD |
| SpyCas9 | G000502 | None | 100.00 | 99.18 | 0.31 | 0.00 | 0.00 | 0.09 | 0.13 | 0.15 | 0.22 | 0.00 | 0.00 |
| mRNA E | | | 33.30 | 99.40 | 0.10 | 0.01 | 0.02 | 0.01 | 0.02 | 0.04 | 0.01 | 0.00 | 0.00 |
| | | | 11.11 | 94.66 | 0.57 | 0.08 | 0.07 | 0.01 | 0.02 | 0.15 | 0.03 | 0.00 | 0.00 |
| | | | 3.70 | 63.64 | 0.07 | 0.00 | 0.00 | 0.00 | 0.00 | 0.16 | 0.22 | 0.00 | 0.00 |
| | | | 1.23 | 21.99 | 2.28 | 0.01 | 0.02 | 0.00 | 0.00 | 0.00 | 0.00 | 0.00 | 0.00 |
| | | | 0.41 | 6.41 | 1.32 | 0.03 | 0.02 | 0.00 | 0.00 | 0.00 | 0.00 | 0.00 | 0.00 |
| | | | 0.14 | 0.99 | 0.47 | 0.00 | 0.00 | 0.00 | 0.00 | 0.00 | 0.00 | 0.00 | 0.00 |
| | | | 0.00 | 0.02 | 0.03 | 0.03 | 0.01 | 0.00 | 0.00 | 0.00 | 0.00 | 0.00 | 0.00 |
| NmeCas9 | None | G021845 | 100.00 | 0.06 | 0.09 | 96.85 | 0.98 | 0.06 | 0.03 | 1.14 | 0.70 | 0.00 | 0.00 |
| mRNA F | | | 33.30 | 0.10 | 0.15 | 96.34 | 0.55 | 0.13 | 0.10 | 0.89 | 0.18 | 0.00 | 0.00 |
| | | | 11.11 | 0.15 | 0.18 | 83.71 | 1.99 | 0.10 | 0.07 | 0.51 | 0.57 | 0.00 | 0.00 |
| | | | 3.70 | 0.05 | 0.04 | 39.32 | 6.06 | 0.00 | 0.00 | 0.38 | 0.29 | 0.00 | 0.00 |
| | | | 1.23 | 0.00 | 0.00 | 9.43 | 0.05 | 0.00 | 0.00 | 0.01 | 0.02 | 0.00 | 0.00 |
| | | | 0.41 | 0.07 | 0.04 | 2.65 | 1.26 | 0.00 | 0.00 | 0.00 | 0.00 | 0.00 | 0.00 |
| | | | 0.14 | 0.00 | 0.00 | 0.52 | 0.11 | 0.00 | 0.00 | 0.00 | 0.00 | 0.00 | 0.00 |
| | | | 0.00 | 0.05 | 0.04 | 0.02 | 0.03 | 0.07 | 0.10 | 0.00 | 0.00 | 0.00 | 0.00 |
| | | G021846 | 100.00 | 0.00 | 0.00 | 97.43 | 0.61 | 0.05 | 0.04 | 0.77 | 0.44 | 0.00 | 0.00 |
| | | | 33.30 | 0.00 | 0.00 | 96.29 | 0.65 | 0.01 | 0.02 | 2.32 | 1.61 | 0.00 | 0.00 |
| | | | 11.11 | 0.00 | 0.00 | 91.62 | 2.08 | 0.10 | 0.12 | 1.33 | 0.46 | 0.00 | 0.00 |
| | | | 3.70 | 0.01 | 0.01 | 66.30 | 0.81 | 0.01 | 0.01 | 0.66 | 0.05 | 0.00 | 0.00 |
| | | | 1.23 | 0.00 | 0.00 | 34.01 | 1.72 | 0.03 | 0.05 | 0.16 | 0.03 | 0.00 | 0.00 |
| | | | 0.41 | 0.01 | 0.01 | 11.73 | 0.68 | 0.00 | 0.00 | 0.11 | 0.16 | 0.00 | 0.00 |
| | | | 0.14 | 0.02 | 0.00 | 2.67 | 1.06 | 0.00 | 0.00 | 0.05 | 0.06 | 0.00 | 0.00 |
| | | | 0.00 | 0.00 | 0.00 | 0.09 | 0.08 | 0.00 | 0.00 | 0.00 | 0.00 | 0.00 | 0.00 |

[0778] In the following tables of sequences, the terms “mA,” “mC,” “mU,” or “mG” are used to denote a nucleotide that has been modified with 2′-O-Me. In the following table, each “N” is used to independently denote any nucleotide (e.g., A, U, T, C, G). In certain embodiments, the nucleotide is an unmodified RNA nucleotide residue, i.e., a ribose sugar and a phosphodiester backbone. In the following table, a “*” is used to denote a PS modification. In this application, the terms A*, C*, U*, or G* may be used to denote a nucleotide that is linked to the next (e.g., 3′) nucleotide with a PS bond. It is understood that if a DNA sequence (comprising Ts) is referenced with respect to an RNA, then Ts should be replaced with Us (which may be modified or unmodified depending on the context), and vice versa. In the following table, single amino acid letter code is used to provide peptide sequences.

TABLE 37
Table of Sequences

| SEQ ID | | |
|---|---|---|
| NO | Description | sequence |
| 1 | Cas9- | GGGAAGCUCAGAAUAAACGCUCAACUUUGGCCGGAUCUGCCACCAUGGACAAGAAGUACUCCAUCGGCCUGGACAUCGGCACCAACUCCGU |
| | Cas9 | GGGCUGGGCCGUGAUCACCGACGAGUACAAGGUGCCCUCCAAGAAGUUCAAGGUGCUGGGCAACACCGACCGGCACUCCAUCAAGAAGAAC |
| | fusion | CUGAUCGGCGCCCUGCUGUUCGACUCCGGCGAGACCGCCGAGGCCACCCGGCUGAAGCGGACCGCCCGGCGGCGGUACACCCGGCGGAAGA |
| | (mRNA A)- | ACCGGAUCUGCUACCUGCAGGAGAUCUUCUCCAACGAGAUGGCCAAGGUGGACGACUCCUUCUUCCACCGGCUGGAGGAGUCCUUCCUGGU |
| | mRNA | GGAGGAGGACAAGAAGCACGAGCGGCACCCCAUCUUCGGCAACAUCGUGGACGAGGUGGCCUACCACGAGAAGUACCCCACCAUCUACCAC |
| | sequence | CUGCGGAAGAAGCUGGUGGACUCCACCGACAAGGCCGACCUGCGGCUGAUCUACCUGGCCCUGGCCCACAUGAUCAAGUUCCGGGGCCACU |
| | | UCCUGAUCGAGGGCGACCUGAACCCCGACAACUCCGACGUGGACAAGCUGUUCAUCCAGCUGGUGCAGACCUACAACCAGCUGUUCGAGGA |
| | | GAACCCCAUCAACGCCUCCGGCGUGGACGCCAAGGCCAUCCUGUCCGCCCGGCUGUCCAAGUCCCGGCGGCUGGAGAACCUGAUCGCCCAG |
| | | CUGCCCGGCGAGAAGAAGAACGGCCUGUUCGGCAACCUGAUCGCCCUGUCCCUGGGCCUGACCCCCAACUUCAAGUCCAACUUCGACCUGG |
| | | CCGAGGACGCCAAGCUGCAGCUGUCCAAGGACACCUACGACGACGACCUGGACAACCUGCUGGCCCAGAUCGGCGACCAGUACGCCGACCU |
| | | GUUCCUGGCCGCCAAGAACCUGUCCGACGCCAUCCUGCUGUCCGACAUCCUGCGGGUGAACACCGAGAUCACCAAGGCCCCCCUGUCCGCC |
| | | UCCAUGAUCAAGCGGUACGACGAGCACCACCAGGACCUGACCCUGCUGAAGGCCCUGGUGCGGCAGCAGCUGCCCGAGAAGUACAAGGAGA |
| | | UCUUCUUCGACCAGUCCAAGAACGGCUACGCCGGCUACAUCGACGGCGGCGCCUCCCAGGAGGAGUUCUACAAGUUCAUCAAGCCCAUCCU |
| | | GGAGAAGAUGGACGGCACCGAGGAGCUGCUGGUGAAGCUGAACCGGGAGGACCUGCUGCGGAAGCAGCGGACCUUCGACAACGGCUCCAUC |
| | | CCCCACCAGAUCCACCUGGGCGAGCUGCACGCCAUCCUGCGGCGGCAGGAGGACUUCUACCCCUUCCUGAAGGACAACCGGGAGAAGAUCG |
| | | AGAAGAUCCUGACCUUCCGGAUCCCCUACUACGUGGGCCCCCUGGCCCGGGGCAACUCCCGGUUCGCCUGGAUGACCCGGAAGUCCGAGGA |
| | | GACCAUCACCCCCUGGAACUUCGAGGAGGUGGUGGACAAGGGCGCCUCCGCCCAGUCCUUCAUCGAGCGGAUGACCAACUUCGACAAGAAC |
| | | CUGCCCAACGAGAAGGUGCUGCCCAAGCACUCCCUGCUGUACGAGUACUUCACCGUGUACAACGAGCUGACCAAGGUGAAGUACGUGACCG |
| | | AGGGCAUGCGGAAGCCCGCCUUCCUGUCCGGCGAGCAGAAGAAGGCCAUCGUGGACCUGCUGUUCAAGACCAACCGGAAGGUGACCGUGAA |
| | | GCAGCUGAAGGAGGACUACUUCAAGAAGAUCGAGUGCUUCGACUCCGUGGAGAUCUCCGGCGUGGAGGACCGGUUCAACGCCUCCCUGGGC |
| | | ACCUACCACGACCUGCUGAAGAUCAUCAAGGACAAGGACUUCCUGGACAACGAGGAGAACGAGGACAUCCUGGAGGACAUCGUGCUGACCC |
| | | UGACCCUGUUCGAGGACCGGGAGAUGAUCGAGGAGCGGCUGAAGACCUACGCCCACCUGUUCGACGACAAGGUGAUGAAGCAGCUGAAGCG |
| | | GCGGCGGUACACCGGCUGGGGCCGGCUGUCCCGGAAGCUGAUCAACGGCAUCCGGGACAAGCAGUCCGGCAAGACCAUCCUGGACUUCCUG |
| | | AAGUCCGACGGCUUCGCCAACCGGAACUUCAUGCAGCUGAUCCACGACGACUCCCUGACCUUCAAGGAGGACAUCCAGAAGGCCCAGGUGU |
| | | CCGGCCAGGGCGACUCCCUGCACGAGCACAUCGCCAACCUGGCCGGCUCCCCCGCCAUCAAGAAGGGCAUCCUGCAGACCGUGAAGGUGGU |
| | | GGACGAGCUGGUGAAGGUGAUGGGCCGGCACAAGCCCGAGAACAUCGUGAUCGAGAUGGCCCGGGAGAACCAGACCACCCAGAAGGGCCAG |
| | | AAGAACUCCCGGGAGCGGAUGAAGCGGAUCGAGGAGGGCAUCAAGGAGCUGGGCUCCCAGAUCCUGAAGGAGCACCCCGUGGAGAACACCC |
| | | AGCUGCAGAACGAGAAGCUGUACCUGUACUACCUGCAGAACGGCCGGGACAUGUACGUGGACCAGGAGCUGGACAUCAACCGGCUGUCCGA |
| | | CUACGACGUGGACCACAUCGUGCCCCAGUCCUUCCUGAAGGACGACUCCAUCGACAACAAGGUGCUGACCCGGUCCGACAAGAACCGGGGC |
| | | AAGUCCGACAACGUGCCCUCCGAGGAGGUGGUGAAGAAGAUGAAGAACUACUGGCGGCAGCUGCUGAACGCCAAGCUGAUCACCCAGCGGA |
| | | AGUUCGACAACCUGACCAAGGCCGAGCGGGGCGGCCUGUCCGAGCUGGACAAGGCCGGCUUCAUCAAGCGGCAGCUGGUGGAGACCCGGCA |
| | | GAUCACCAAGCACGUGGCCCAGAUCCUGGACUCCCGGAUGAACACCAAGUACGACGAGAACGACAAGCUGAUCCGGGAGGUGAAGGUGAUC |
| | | ACCCUGAAGUCCAAGCUGGUGUCCGACUUCCGGAAGGACUUCCAGUUCUACAAGGUGCGGGAGAUCAACAACUACCACCACGCCCACGACG |
| | | CCUACCUGAACGCCGUGGUGGGCACCGCCCUGAUCAAGAAGUACCCCAAGCUGGAGUCCGAGUUCGUGUACGGCGACUACAAGGUGUACGA |
| | | CGUGCGGAAGAUGAUCGCCAAGUCCGAGCAGGAGAUCGGCAAGGCCACCGCCAAGUACUUCUUCUACUCCAACAUCAUGAACUUCUUCAAG |
| | | ACCGAGAUCACCCUGGCCAACGGCGAGAUCCGGAAGCGGCCCCUGAUCGAGACCAACGGCGAGACCGGCGAGAUCGUGUGGGACAAGGGCC |
| | | GGGACUUCGCCACCGUGCGGAAGGUGCUGUCCAUGCCCCAGGUGAACAUCGUGAAGAAGACCGAGGUGCAGACCGGCGGCUUCUCCAAGGA |
| | | GUCCAUCCUGCCCAAGCGGAACUCCGACAAGCUGAUCGCCCGGAAGAAGGACUGGGACCCCAAGAAGUACGGCGGCUUCGACUCCCCCACC |
| | | GUGGCCUACUCCGUGCUGGUGGUGGCCAAGGUGGAGAAGGGCAAGUCCAAGAAGCUGAAGUCCGUGAAGGAGCUGCUGGGCAUCACCAUCA |
| | | UGGAGCGGUCCUCCUUCGAGAAGAACCCCAUCGACUUCCUGGAGGCCAAGGGCUACAAGGAGGUGAAGAAGGACCUGAUCAUCAAGCUGCC |
| | | CAAGUACUCCCUGUUCGAGCUGGAGAACGGCCGGAAGCGGAUGCUGGCCUCCGCCGGCGAGCUGCAGAAGGGCAACGAGCUGGCCCUGCCC |
| | | UCCAAGUACGUGAACUUCCUGUACCUGGCCUCCCACUACGAGAAGCUGAAGGGCUCCCCCGAGGACAACGAGCAGAAGCAGCUGUUCGUGG |
| | | AGCAGCACAAGCACUACCUGGACGAGAUCAUCGAGCAGAUCUCCGAGUUCUCCAAGCGGGUGAUCCUGGCCGACGCCAACCUGGACAAGGU |
| | | GCUGUCCGCCUACAACAAGCACCGGGACAAGCCCAUCCGGGAGCAGGCCGAGAACAUCAUCCACCUGUUCACCCUGACCAACCUGGGCGCC |
| | | CCCGCCGCCUUCAAGUACUUCGACACCACCAUCGACAAGAAGCGGUACACCUCCACCAAGGAGGUGCUGGACGCCACCCUGAUCCACCAGU |
| | | CCAUCACCGGCCUGUACGAGACCCGGAUCGACCUGUCCCAGCUGGGCGGCGACGGCGCCCCCGAGUCCGCCACCGAGUCCGGCGGCACCUC |
| | | CACCGAGUCCGAGGGCUCCGCCGGCACCUCCACCGAGUCCGAGGGCUCCGCCGGCUCCGCCGGCUCCACCUCCACCGAGGAGGGCACCUCC |
| | | ACCGAGUCCGAGGGCUCCGCCGGCACCUCCACCGAGUCCGAGGGCUCCGCCGGCACCUCCGAGUCCGCCACCGAGUCCGGCGGCACCUCCA |
| | | CCGAGUCCGAGGGCUCCUCCUCCGGUGCCGCCUUCAAGCCCAACCCCAUCAACUACAUCCUGGGCCUGGACAUCGGCAUCGCCUCCGUGGG |
| | | CUGGGCCAUGGUGGAGAUCGACGAGGAGGAGAACCCCAUCCGGCUGAUCGACCUGGGCGUGCGGGUGUUCGAGCGGGCCGAGGUGCCCAAG |
| | | ACCGGCGACUCCCUGGCCAUGGCCCGGCGGCUGGCCCGGUCCGUGCGGCGGCUGACCCGGGGGGGGGCCCACCGGCUGCUGCGGGCCCGGC |
| | | GGCUGCUGAAGCGGGAGGGCGUGCUGCAGGCCGCCGACUUCGACGAGAACGGCCUGAUCAAGUCCCUGCCCAACACCCCCUGGCAGCUGCG |
| | | GGCCGCCGCCCUGGACCGGAAGCUGACCCCCCUGGAGUGGUCCGCCGUGCUGCUGCACCUGAUCAAGCACCGGGGCUACCUGUCCCAGCGG |
| | | AAGAACGAGGGCGAGACCGCCGACAAGGAGCUGGGCGCCCUGCUGAAGGGCGUGGCCAACAACGCCCACGCCCUGCAGACCGGCGACUUCC |
| | | GGACCCCCGCCGAGCUGGCCCUGAACAAGUUCGAGAAGGAGUCCGGCCACAUCCGGAACCAGCGGGGCGACUACUCCCACACCUUCUCCCG |
| | | GAAGGACCUGCAGGCCGAGCUGAUCCUGCUGUUCGAGAAGCAGAAGGAGUUCGGCAACCCCCACGUGUCCGGCGGCCUGAAGGAGGGCAUC |
| | | GAGACCCUGCUGAUGACCCAGCGGCCCGCCCUGUCCGGCGACGCCGUGCAGAAGAUGCUGGGCCACUGCACCUUCGAGCCCGCCGAGCCCA |
| | | AGGCCGCCAAGAACACCUACACCGCCGAGCGGUUCAUCUGGCUGACCAAGCUGAACAACCUGCGGAUCCUGGAGCAGGGCUCCGAGCGGCC |
| | | CCUGACCGACACCGAGCGGGCCACCCUGAUGGACGAGCCCUACCGGAAGUCCAAGCUGACCUACGCCCAGGCCCGGAAGCUGCUGGGCCUG |
| | | GAGGACACCGCCUUCUUCAAGGGCCUGCGGUACGGCAAGGACAACGCCGAGGCCUCCACCCUGAUGGAGAUGAAGGCCUACCACGCCAUCU |
| | | CCCGGGCCCUGGAGAAGGAGGGCCUGAAGGACAAGAAGUCCCCCCUGAACCUGUCCUCCGAGCUGCAGGACGAGAUCGGCACCGCCUUCUC |
| | | CCUGUUCAAGACCGACGAGGACAUCACCGGCCGGCUGAAGGACCGGGUGCAGCCCGAGAUCCUGGAGGCCCUGCUGAAGCACAUCUCCUUC |
| | | GACAAGUUCGUGCAGAUCUCCCUGAAGGCCCUGCGGCGGAUCGUGCCCCUGAUGGAGCAGGGCAAGCGGUACGACGAGGCCUGCGCCGAGA |
| | | UCUACGGCGACCACUACGGCAAGAAGAACACCGAGGAGAAGAUCUACCUGCCCCCCAUCCCCGCCGACGAGAUCCGGAACCCCGUGGUGCU |
| | | GCGGGCCCUGUCCCAGGCCCGGAAGGUGAUCAACGGCGUGGUGCGGCGGUACGGCUCCCCCGCCCGGAUCCACAUCGAGACCGCCCGGGAG |
| | | GUGGGCAAGUCCUUCAAGGACCGGAAGGAGAUCGAGAAGCGGCAGGAGGAGAACCGGAAGGACCGGGAGAAGGCCGCCGCCAAGUUCCGGG |
| | | AGUACUUCCCCAACUUCGUGGGCGAGCCCAAGUCCAAGGACAUCCUGAAGCUGCGGCUGUACGAGCAGCAGCACGGCAAGUGCCUGUACUC |
| | | CGGCAAGGAGAUCAACCUGGUGCGGCUGAACGAGAAGGGCUACGUGGAGAUCGACCACGCCCUGCCCUUCUCCCGGACCUGGGACGACUCC |
| | | UUCAACAACAAGGUGCUGGUGCUGGGCUCCGAGAACCAGAACAAGGGCAACCAGACCCCCUACGAGUACUUCAACGGCAAGGACAACUCCC |
| | | GGGAGUGGCAGGAGUUCAAGGCCCGGGUGGAGACCUCCCGGUUCCCCCGGUCCAAGAAGCAGCGGAUCCUGCUGCAGAAGUUCGACGAGGA |
| | | CGGCUUCAAGGAGUGCAACCUGAACGACACCCGGUACGUGAACCGCUUCCUGUGCCAGUUCGUGGCCGACCACAUCCUGCUGACCGGCAAG |
| | | GGCAAGCGGCGGGUGUUCGCCUCCAACGGCCAGAUCACCAACCUGCUGCGGGGCUUCUGGGGCCUGCGGAAGGUGCGGGCCGAGAACGACC |
| | | GGCACCACGCCCUGGACGCCGUGGUGGUGGCCUGCUCCACCGUGGCCAUGCAGCAGAAGAUCACCCGGUUCGUGCGGUACAAGGAGAUGAA |
| | | CGCCUUCGACGGCAAGACCAUCGACAAGGAGACCGGCAAGGUGCUGCACCAGAAGACCCACUUCCCCCAGCCCUGGGAGUUCUUCGCCCAG |
| | | GAGGUGAUGAUCCGGGUGUUCGGCAAGCCCGACGGCAAGCCCGAGUUCGAGGAGGCCGACACCCCCGAGAAGCUGCGGACCCUGCUGGCCG |
| | | AGAAGCUGUCCUCCCGGCCCGAGGCCGUGCACGAGUACGUGACCCCCCUGUUCGUGUCCCGGGCCCCCAACCGGAAGAUGUCCGGCGCCCA |
| | | CAAGGACACCCUGCGGUCCGCCAAGCGGUUCGUGAAGCACAACGAGAAGAUCUCCGUGAAGCGGGUGUGGCUGACCGAGAUCAAGCUGGCC |
| | | GACCUGGAGAACAUGGUGAACUACAAGAACGGCCGGGAGAUCGAGCUGUACGAGGCCCUGAAGGCCCGGCUGGAGGCCUACGGCGGCAACG |
| | | CCAAGCAGGCCUUCGACCCCAAGGACAACCCCUUCUACAAGAAGGGCGGCCAGCUGGUGAAGGCCGUGCGGGUGGAGAAGACCCAGGAGUC |
| | | CGGCGUGCUGCUGAACAAGAAGAACGCCUACACCAUCGCCGACAACGGCGACAUGGUGCGGGUGGACGUGUUCUGCAAGGUGGACAAGAAG |
| | | GGCAAGAACCAGUACUUCAUCGUGCCCAUCUACGCCUGGCAGGUGGCCGAGAACAUCCUGCCCGACAUCGACUGCAAGGGCUACCGGAUCG |
| | | ACGACUCCUACACCUUCUGCUUCUCCCUGCACAAGUACGACCUGAUCGCCUUCCAGAAGGACGAGAAGUCCAAGGUGGAGUUCGCCUACUA |
| | | CAUCAACUGCGACUCCUCCAACGGCCGGUUCUACCUGGCCUGGCACGACAAGGGCUCCAAGGAGCAGCAGUUCCGGAUCUCCACCCAGAAC |
| | | CUGGUGCUGAUCCAGAAGUACCAGGUGAACGAGCUGGGCAAGGAGAUCCGGCCCUGCCGGCUGAAGAAGCGGCCCCCCGUGCGGUCCGGAA |
| | | AGCGGACCGCCGACGGCUCCGAGUUCGAGUCCCCCAAGAAGAAGCGGAAGGUGGAGUAGCUAGCACCAGCCUCAAGAACACCCGAAUGGAG |
| | | UCUCUAAGCUACAUAAUACCAACUUACACUUUACAAAAUGUUGUCCCCCAAAAUGUAGCCAUUCGUAUCUGCUCCUAAUAAAAAGAAAGUU |
| | | UCUUCACAUUCUCUCGAGAAAAAAAAAAAAUGGAAAAAAAAAAAACGGAAAAAAAAAAAAGGUAAAAAAAAAAAAUAUAAAAAAAAAAAAC |
| | | AUAAAAAAAAAAAACGAAAAAAAAAAAACGUAAAAAAAAAAAACUCAAAAAAAAAAAAGAUAAAAAAAAAAAACCUAAAAAAAAAAAAUGU |
| | | AAAAAAAAAAAAGGGAAAAAAAAAAAACGCAAAAAAAAAAAACACAAAAAAAAAAAAUGCAAAAAAAAAAAAUCGAAAAAAAAAAAAUCUA |
| | | AAAAAAAAAAACGAAAAAAAAAAAACCCAAAAAAAAAAAAGACAAAAAAAAAAAAUAGAAAAAAAAAAAGUUAAAAAAAAAAAACUGAAAA |
| | | AAAAAAAAUUUAAAAAAAAAAAAUCUAG |
| 2 | Cas9- | auggacaagaaguacuccaucggccuggacaucggcaccaacuccgugggcugggccgugaucaccgacgaguacaaggugcccuccaaga |
| | Cas9 | aguucaaggugcugggcaacaccgaccggcacuccaucaagaagaaccugaucggcgcccugcuguucgacuccggcgagaccgccgaggc |
| | fusion | cacccggcugaagcggaccgcccggcggcgguacacccggcggaagaaccggaucugcuaccugcaggagaucuucuccaacgagauggcc |
| | (mRNA A)- | aagguggacgacuccuucuuccaccggcuggaggaguccuuccugguggaggaggacaagaagcacgagcggcaccccaucuucggcaaca |
| | ORF | ucguggacgagguggccuaccacgagaaguaccccaccaucuaccaccugcggaagaagcugguggacuccaccgacaaggccgaccugcg |
| | sequence | gcugaucuaccuggcccuggcccacaugaucaaguuccggggccacuuccugaucgagggcgaccugaaccccgacaacuccgacguggac |
| | | aagcuguucauccagcuggugcagaccuacaaccagcuguucgaggagaaccccaucaacgccuccggcguggacgccaaggccauccugu |
| | | ccgcccggcuguccaagucccggcggcuggagaaccugaucgcccagcugcccggcgagaagaagaacggccuguucggcaaccugaucgc |
| | | ccugucccugggccugacccccaacuucaaguccaacuucgaccuggccgaggacgccaagcugcagcuguccaaggacaccuacgacgac |
| | | gaccuggacaaccugcuggcccagaucggcgaccaguacgccgaccuguuccuggccgccaagaaccuguccgacgccauccugcuguccg |
| | | acauccugcgggugaacaccgagaucaccaaggccccccuguccgccuccaugaucaagcgguacgacgagcaccaccaggaccugacccu |
| | | gcugaaggcccuggugcggcagcagcugcccgagaaguacaaggagaucuucuucgaccaguccaagaacggcuacgccggcuacaucgac |
| | | ggcggcgccucccaggaggaguucuacaaguucaucaagcccauccuggagaagauggacggcaccgaggagcugcuggugaagcugaacc |
| | | gggaggaccugcugcggaagcagcggaccuucgacaacggcuccaucccccaccagauccaccugggcgagcugcacgccauccugcggcg |
| | | gcaggaggacuucuaccccuuccugaaggacaaccgggagaagaucgagaagauccugaccuuccggauccccuacuacgugggcccccug |
| | | gcccggggcaacucccgguucgccuggaugacccggaaguccgaggagaccaucacccccuggaacuucgaggaggugguggacaagggcg |
| | | ccuccgcccaguccuucaucgagcggaugaccaacuucgacaagaaccugcccaacgagaaggugcugcccaagcacucccugcuguacga |
| | | guacuucaccguguacaacgagcugaccaaggugaaguacgugaccgagggcaugcggaagcccgccuuccuguccggcgagcagaagaag |
| | | gccaucguggaccugcuguucaagaccaaccggaaggugaccgugaagcagcugaaggaggacuacuucaagaagaucgagugcuucgacu |
| | | ccguggagaucuccggcguggaggaccgguucaacgccucccugggcaccuaccacgaccugcugaagaucaucaaggacaaggacuuccu |
| | | ggacaacgaggagaacgaggacauccuggaggacaucgugcugacccugacccuguucgaggaccgggagaugaucgaggagcggcugaag |
| | | accuacgcccaccuguucgacgacaaggugaugaagcagcugaagcggcggcgguacaccggcuggggccggcugucccggaagcugauca |
| | | acggcauccgggacaagcaguccggcaagaccauccuggacuuccugaaguccgacggcuucgccaaccggaacuucaugcagcugaucca |
| | | cgacgacucccugaccuucaaggaggacauccagaaggcccagguguccggccagggcgacucccugcacgagcacaucgccaaccuggcc |
| | | ggcucccccgccaucaagaagggcauccugcagaccgugaaggugguggacgagcuggugaaggugaugggccggcacaagcccgagaaca |
| | | ucgugaucgagauggcccgggagaaccagaccacccagaagggccagaagaacucccgggagcggaugaagcggaucgaggagggcaucaa |
| | | ggagcugggcucccagauccugaaggagcaccccguggagaacacccagcugcagaacgagaagcuguaccuguacuaccugcagaacggc |
| | | cgggacauguacguggaccaggagcuggacaucaaccggcuguccgacuacgacguggaccacaucgugccccaguccuuccugaaggacg |
| | | acuccaucgacaacaaggugcugacccgguccgacaagaaccggggcaaguccgacaacgugcccuccgaggagguggugaagaagaugaa |
| | | gaacuacuggcggcagcugcugaacgccaagcugaucacccagcggaaguucgacaaccugaccaaggccgagcggggcggccuguccgag |
| | | cuggacaaggccggcuucaucaagcggcagcugguggagacccggcagaucaccaagcacguggcccagauccuggacucccggaugaaca |
| | | ccaaguacgacgagaacgacaagcugauccgggaggugaaggugaucacccugaaguccaagcugguguccgacuuccggaaggacuucca |
| | | guucuacaaggugcgggagaucaacaacuaccaccacgcccacgacgccuaccugaacgccguggugggcaccgcccugaucaagaaguac |
| | | cccaagcuggaguccgaguucguguacggcgacuacaagguguacgacgugcggaagaugaucgccaaguccgagcaggagaucggcaagg |
| | | ccaccgccaaguacuucuucuacuccaacaucaugaacuucuucaagaccgagaucacccuggccaacggcgagauccggaagcggccccu |
| | | gaucgagaccaacggcgagaccggcgagaucgugugggacaagggccgggacuucgccaccgugcggaaggugcuguccaugccccaggug |
| | | aacaucgugaagaagaccgaggugcagaccggcggcuucuccaaggaguccauccugcccaagcggaacuccgacaagcugaucgcccgga |
| | | agaaggacugggaccccaagaaguacggcggcuucgacucccccaccguggccuacuccgugcuggugguggccaagguggagaagggcaa |
| | | guccaagaagcugaaguccgugaaggagcugcugggcaucaccaucauggagcgguccuccuucgagaagaaccccaucgacuuccuggag |
| | | gccaagggcuacaaggaggugaagaaggaccugaucaucaagcugcccaaguacucccuguucgagcuggagaacggccggaagcggaugc |
| | | uggccuccgccggcgagcugcagaagggcaacgagcuggcccugcccuccaaguacgugaacuuccuguaccuggccucccacuacgagaa |
| | | gcugaagggcucccccgaggacaacgagcagaagcagcuguucguggagcagcacaagcacuaccuggacgagaucaucgagcagaucucc |
| | | gaguucuccaagcgggugauccuggccgacgccaaccuggacaaggugcuguccgccuacaacaagcaccgggacaagcccauccgggagc |
| | | aggccgagaacaucauccaccuguucacccugaccaaccugggcgcccccgccgccuucaaguacuucgacaccaccaucgacAAGaagcg |
| | | guacaccuccaccaaggaggugcuggacgccacccugauccaccaguccaucaccggccuguacgagacccggaucgaccugucccagcug |
| | | ggcggcgacGGCgccCCCgagUCCgccACCgagUCCggcGGCaccUCCaccGAGuccGAGggcUCCgccGGCaccUCCaccGAGuccGAGg |
| | | gcuccGCCggcUCCgccGGCuccaccUCCaccGAGgagGGCaccUCCaccGAGuccGAGggcuccGCCggcACCuccACCgaguccgagGG |
| | | CuccGCCggcACCuccGAGuccgccACCgagUCCggcGGCaccUCCaccGAGuccGAGggcUCCuccUCCggugccgccuucaagcccaac |
| | | cccaucaacuacauccugggccuggacaucggcaucgccuccgugggcugggccaugguggagaucgacgaggaggagaaccccauccggc |
| | | ugaucgaccugggcgugcggguguucgagcgggccgaggugcccaagaccggcgacucccuggccauggcccggcggcuggcccgguccgu |
| | | gcggcggcugacccggcggcgggcccaccggcugcugcgggcccggcggcugcugaagcgggagggcgugcugcaggccgccgacuucgac |
| | | gagaacggccugaucaagucccugcccaacacccccuggcagcugcgggccgccgcccuggaccggaagcugaccccccuggagugguccg |
| | | ccgugcugcugcaccugaucaagcaccggggcuaccugucccagcggaagaacgagggcgagaccgccgacaaggagcugggcgcccugcu |
| | | gaagggcguggccaacaacgcccacgcccugcagaccggcgacuuccggacccccgccgagcuggcccugaacaaguucgagaaggagucc |
| | | ggccacauccggaaccagcggggcgacuacucccacaccuucucccggaaggaccugcaggccgagcugauccugcuguucgagaagcaga |
| | | aggaguucggcaacccccacguguccggcggccugaaggagggcaucgagacccugcugaugacccagcggcccgcccuguccggcgacgc |
| | | cgugcagaagaugcugggccacugcaccuucgagcccgccgagcccaaggccgccaagaacaccuacaccgccgagcgguucaucuggcug |
| | | accaagcugaacaaccugcggauccuggagcagggcuccgagcggccccugaccgacaccgagcgggccacccugauggacgagcccuacc |
| | | ggaaguccaagcugaccuacgcccaggcccggaagcugcugggccuggaggacaccgccuucuucaagggccugcgguacggcaaggacaa |
| | | cgccgaggccuccacccugauggagaugaaggccuaccacgccaucucccgggcccuggagaaggagggccugaaggacaagaaguccccc |
| | | cugaaccuguccuccgagcugcaggacgagaucggcaccgccuucucccuguucaagaccgacgaggacaucaccggccggcugaaggacc |
| | | gggugcagcccgagauccuggaggcccugcugaagcacaucuccuucgacaaguucgugcagaucucccugaaggcccugcggcggaucgu |
| | | gccccugauggagcagggcaagcgguacgacgaggccugcgccgagaucuacggcgaccacuacggcaagaagaacaccgaggagaagauc |
| | | uaccugccccccauccccgccgacgagauccggaaccccguggugcugcgggcccugucccaggcccggaaggugaucaacggcguggugc |
| | | ggcgguacggcucccccgcccggauccacaucgagaccgcccgggaggugggcaaguccuucaaggaccggaaggagaucgagaagcggca |
| | | ggaggagaaccggaaggaccgggagaaggccgccgccaaguuccgggaguacuuccccaacuucgugggcgagcccaaguccaaggacauc |
| | | cugaagcugcggcuguacgagcagcagcacggcaagugccuguacuccggcaaggagaucaaccuggugcggcugaacgagaagggcuacg |
| | | uggagaucgaccacgcccugcccuucucccggaccugggacgacuccuucaacaacaaggugcuggugcugggcuccgagaaccagaacaa |
| | | gggcaaccagacccccuacgaguacuucaacggcaaggacaacucccgggaguggcaggaguucaaggcccggguggagaccucccgguuc |
| | | ccccgguccaagaagcagcggauccugcugcagaaguucgacgaggacggcuucaaggagugcaaccugaacgacacccgguacgugaacc |
| | | gcuuccugugccaguucguggccgaccacauccugcugaccggcaagggcaagcggcggguguucgccuccaacggccagaucaccaaccu |
| | | gcugcggggcuucuggggccugcggaaggugcgggccgagaacgaccggcaccacgcccuggacgccguggugguggccugcuccaccgug |
| | | gccaugcagcagaagaucacccgguucgugcgguacaaggagaugaacgccuucgacggcaagaccaucgacaaggagaccggcaaggugc |
| | | ugcaccagaagacccacuucccccagcccugggaguucuucgcccaggaggugaugauccggguguucggcaagcccgacggcaagcccga |
| | | guucgaggaggccgacacccccgagaagcugcggacccugcuggccgagaagcuguccucccggcccgaggccgugcacgaguacgugacc |
| | | ccccuguucgugucccgggcccccaaccggaagauguccggcgcccacaaggacacccugcgguccgccaagcgguucgugaagcacaacg |
| | | agaagaucuccgugaagcggguguggcugaccgagaucaagcuggccgaccuggagaacauggugaacuacaagaacggccgggagaucga |
| | | gcuguacgaggcccugaaggcccggcuggaggccuacggcggcaacgccaagcaggccuucgaccccaaggacaaccccuucuacaagaag |
| | | ggcggccagcuggugaaggccgugcggguggagaagacccaggaguccggcgugcugcugaacaagaagaacgccuacaccaucgccgaca |
| | | acggcgacauggugcggguggacguguucugcaagguggacaagaagggcaagaaccaguacuucaucgugcccaucuacgccuggcaggu |
| | | ggccgagaacauccugcccgacaucgacugcaagggcuaccggaucgacgacuccuacaccuucugcuucucccugcacaaguacgaccug |
| | | aucgccuuccagaaggacgagaaguccaagguggaguucgccuacuacaucaacugcgacuccuccaacggccgguucuaccuggccuggc |
| | | acgacaagggcuccaaggagcagcaguuccggaucuccacccagaaccuggugcugauccagaaguaccaggugaacgagcugggcaagga |
| | | gauccggcccugccggcugaagaagcggccccccgugcgguccggaaagcggaccgccgacggcuccgaguucgagucccccaagaagaag |
| | | cggaagguggaguag |
| 3 | Cas9- | MDKKYSIGLDIGTNSVGWAVITDEYKVPSKKFKVLGNTDRHSIKKNLIGALLFDSGETAEATRLKRTARRRYTRRKNRICYLQEIFSNEMA |
| | Cas9 | KVDDSFFHRLEESFLVEEDKKHERHPIFGNIVDEVAYHEKYPTIYHLRKKLVDSTDKADLRLIYLALAHMIKFRGHFLIEGDLNPDNSDVD |
| | fusion | KLFIQLVQTYNQLFEENPINASGVDAKAILSARLSKSRRLENLIAQLPGEKKNGLFGNLIALSLGLTPNFKSNFDLAEDAKLQLSKDTYDD |
| | (mRNA A)- | DLDNLLAQIGDQYADLFLAAKNLSDAILLSDILRVNTEITKAPLSASMIKRYDEHHQDLTLLKALVRQQLPEKYKEIFFDQSKNGYAGYID |
| | amino | GGASQEEFYKFIKPILEKMDGTEELLVKLNREDLLRKQRTFDNGSIPHQIHLGELHAILRRQEDFYPFLKDNREKIEKILTFRIPYYVGPL |
| | acid | ARGNSRFAWMTRKSEETITPWNFEEVVDKGASAQSFIERMTNFDKNLPNEKVLPKHSLLYEYFTVYNELTKVKYVTEGMRKPAFLSGEQKK |
| | sequence | AIVDLLFKTNRKVTVKQLKEDYFKKIECFDSVEISGVEDRFNASLGTYHDLLKIIKDKDFLDNEENEDILEDIVLTLTLFEDREMIEERLK |
| | | TYAHLFDDKVMKQLKRRRYTGWGRLSRKLINGIRDKQSGKTILDFLKSDGFANRNFMQLIHDDSLTFKEDIQKAQVSGQGDSLHEHIANLA |
| | | GSPAIKKGILQTVKVVDELVKVMGRHKPENIVIEMARENQTTQKGQKNSRERMKRIEEGIKELGSQILKEHPVENTQLQNEKLYLYYLQNG |
| | | RDMYVDQELDINRLSDYDVDHIVPQSFLKDDSIDNKVLTRSDKNRGKSDNVPSEEVVKKMKNYWRQLLNAKLITQRKFDNLTKAERGGLSE |
| | | LDKAGFIKRQLVETRQITKHVAQILDSRMNTKYDENDKLIREVKVITLKSKLVSDFRKDFQFYKVREINNYHHAHDAYLNAVVGTALIKKY |
| | | PKLESEFVYGDYKVYDVRKMIAKSEQEIGKATAKYFFYSNIMNFFKTEITLANGEIRKRPLIETNGETGEIVWDKGRDFATVRKVLSMPQV |
| | | NIVKKTEVQTGGFSKESILPKRNSDKLIARKKDWDPKKYGGFDSPTVAYSVLVVAKVEKGKSKKLKSVKELLGITIMERSSFEKNPIDFLE |
| | | AKGYKEVKKDLIIKLPKYSLFELENGRKRMLASAGELQKGNELALPSKYVNFLYLASHYEKLKGSPEDNEQKQLFVEQHKHYLDEIIEQIS |
| | | EFSKRVILADANLDKVLSAYNKHRDKPIREQAENIIHLFTLTNLGAPAAFKYFDTTIDKKRYTSTKEVLDATLIHQSITGLYETRIDLSQL |
| | | GGDGAPESATESGGTSTESEGSAGTSTESEGSAGSAGSTSTEEGTSTESEGSAGTSTESEGSAGTSESATESGGTSTESEGSSSGAAFKPN |
| | | PINYILGLDIGIASVGWAMVEIDEEENPIRLIDLGVRVFERAEVPKTGDSLAMARRLARSVRRLTRRRAHRLLRARRLLKREGVLQAADFD |
| | | ENGLIKSLPNTPWQLRAAALDRKLTPLEWSAVLLHLIKHRGYLSQRKNEGETADKELGALLKGVANNAHALQTGDFRTPAELALNKFEKES |
| | | GHIRNQRGDYSHTFSRKDLQAELILLFEKQKEFGNPHVSGGLKEGIETLLMTQRPALSGDAVQKMLGHCTFEPAEPKAAKNTYTAERFIWL |
| | | TKLNNLRILEQGSERPLTDTERATLMDEPYRKSKLTYAQARKLLGLEDTAFFKGLRYGKDNAEASTLMEMKAYHAISRALEKEGLKDKKSP |
| | | LNLSSELQDEIGTAFSLFKTDEDITGRLKDRVQPEILEALLKHISFDKFVQISLKALRRIVPLMEQGKRYDEACAEIYGDHYGKKNTEEKI |
| | | YLPPIPADEIRNPVVLRALSQARKVINGVVRRYGSPARIHIETAREVGKSFKDRKEIEKRQEENRKDREKAAAKFREYFPNFVGEPKSKDI |
| | | LKLRLYEQQHGKCLYSGKEINLVRLNEKGYVEIDHALPFSRTWDDSFNNKVLVLGSENQNKGNQTPYEYFNGKDNSREWQEFKARVETSRF |
| | | PRSKKQRILLQKFDEDGFKECNLNDTRYVNRFLCQFVADHILLTGKGKRRVFASNGQITNLLRGFWGLRKVRAENDRHHALDAVVVACSTV |
| | | AMQQKITRFVRYKEMNAFDGKTIDKETGKVLHQKTHFPQPWEFFAQEVMIRVFGKPDGKPEFEEADTPEKLRTLLAEKLSSRPEAVHEYVT |
| | | PLFVSRAPNRKMSGAHKDTLRSAKRFVKHNEKISVKRVWLTEIKLADLENMVNYKNGREIELYEALKARLEAYGGNAKQAFDPKDNPFYKK |
| | | GGQLVKAVRVEKTQESGVLLNKKNAYTIADNGDMVRVDVFCKVDKKGKNQYFIVPIYAWQVAENILPDIDCKGYRIDDSYTFCFSLHKYDL |
| | | IAFQKDEKSKVEFAYYINCDSSNGRFYLAWHDKGSKEQQFRISTQNLVLIQKYQVNELGKEIRPCRLKKRPPVRSGKRTADGSEFESPKKK |
| | | RKVE* |
| 4 | Cas9- | auggacaagaaguacuccaucggccuggacaucggcaccaacuccgugggcugggccgugaucaccgacgaguacaaggugcccuccaaga |
| | Cas9 | aguucaaggugcugggcaacaccgaccggcacuccaucaagaagaaccugaucggcgcccugcuguucgacuccggcgagaccgccgaggc |
| | fusion | cacccggcugaagcggaccgcccggcggcgguacacccggcggaagaaccggaucugcuaccugcaggagaucuucuccaacgagauggcc |
| | (mRNA A | aagguggacgacuccuucuuccaccggcuggaggaguccuuccugguggaggaggacaagaagcacgagcggcaccccaucuucggcaaca |
| | with | ucguggacgagguggccuaccacgagaaguaccccaccaucuaccaccugcggaagaagcugguggacuccaccgacaaggccgaccugcg |
| | HiBit | gcugaucuaccuggcccuggcccacaugaucaaguuccggggccacuuccugaucgagggcgaccugaaccccgacaacuccgacguggac |
| | tag)- | aagcuguucauccagcuggugcagaccuacaaccagcuguucgaggagaaccccaucaacgccuccggcguggacgccaaggccauccugu |
| | ORF | ccgcccggcuguccaagucccggcggcuggagaaccugaucgcccagcugcccggcgagaagaagaacggccuguucggcaaccugaucgc |
| | sequence | ccugucccugggccugacccccaacuucaaguccaacuucgaccuggccgaggacgccaagcugcagcuguccaaggacaccuacgacgac |
| | | gaccuggacaaccugcuggcccagaucggcgaccaguacgccgaccuguuccuggccgccaagaaccuguccgacgccauccugcuguccg |
| | | acauccugcgggugaacaccgagaucaccaaggccccccuguccgccuccaugaucaagcgguacgacgagcaccaccaggaccugacccu |
| | | gcugaaggcccuggugcggcagcagcugcccgagaaguacaaggagaucuucuucgaccaguccaagaacggcuacgccggcuacaucgac |
| | | ggcggcgccucccaggaggaguucuacaaguucaucaagcccauccuggagaagauggacggcaccgaggagcugcuggugaagcugaacc |
| | | gggaggaccugcugcggaagcagcggaccuucgacaacggcuccaucccccaccagauccaccugggcgagcugcacgccauccugcggcg |
| | | gcaggaggacuucuaccccuuccugaaggacaaccgggagaagaucgagaagauccugaccuuccggauccccuacuacgugggcccccug |
| | | gcccggggcaacucccgguucgccuggaugacccggaaguccgaggagaccaucacccccuggaacuucgaggaggugguggacaagggcg |
| | | ccuccgcccaguccuucaucgagcggaugaccaacuucgacaagaaccugcccaacgagaaggugcugcccaagcacucccugcuguacga |
| | | guacuucaccguguacaacgagcugaccaaggugaaguacgugaccgagggcaugcggaagcccgccuuccuguccggcgagcagaagaag |
| | | gccaucguggaccugcuguucaagaccaaccggaaggugaccgugaagcagcugaaggaggacuacuucaagaagaucgagugcuucgacu |
| | | ccguggagaucuccggcguggaggaccgguucaacgccucccugggcaccuaccacgaccugcugaagaucaucaaggacaaggacuuccu |
| | | ggacaacgaggagaacgaggacauccuggaggacaucgugcugacccugacccuguucgaggaccgggagaugaucgaggagcggcugaag |
| | | accuacgcccaccuguucgacgacaaggugaugaagcagcugaagcggcggcgguacaccggcuggggccggcugucccggaagcugauca |
| | | acggcauccgggacaagcaguccggcaagaccauccuggacuuccugaaguccgacggcuucgccaaccggaacuucaugcagcugaucca |
| | | cgacgacucccugaccuucaaggaggacauccagaaggcccagguguccggccagggcgacucccugcacgagcacaucgccaaccuggcc |
| | | ggcucccccgccaucaagaagggcauccugcagaccgugaaggugguggacgagcuggugaaggugaugggccggcacaagcccgagaaca |
| | | ucgugaucgagauggcccgggagaaccagaccacccagaagggccagaagaacucccgggagcggaugaagcggaucgaggagggcaucaa |
| | | ggagcugggcucccagauccugaaggagcaccccguggagaacacccagcugcagaacgagaagcuguaccuguacuaccugcagaacggc |
| | | cgggacauguacguggaccaggagcuggacaucaaccggcuguccgacuacgacguggaccacaucgugccccaguccuuccugaaggacg |
| | | acuccaucgacaacaaggugcugacccgguccgacaagaaccggggcaaguccgacaacgugcccuccgaggagguggugaagaagaugaa |
| | | gaacuacuggcggcagcugcugaacgccaagcugaucacccagcggaaguucgacaaccugaccaaggccgagcggcggggccuguccgag |
| | | cuggacaaggccggcuucaucaagcggcagcugguggagacccggcagaucaccaagcacguggcccagauccuggacucccggaugaaca |
| | | ccaaguacgacgagaacgacaagcugauccgggaggugaaggugaucacccugaaguccaagcugguguccgacuuccggaaggacuucca |
| | | guucuacaaggugcgggagaucaacaacuaccaccacgcccacgacgccuaccugaacgccguggugggcaccgcccugaucaagaaguac |
| | | cccaagcuggaguccgaguucguguacggcgacuacaagguguacgacgugcggaagaugaucgccaaguccgagcaggagaucggcaagg |
| | | ccaccgccaaguacuucuucuacuccaacaucaugaacuucuucaagaccgagaucacccuggccaacggcgagauccggaagcggccccu |
| | | gaucgagaccaacggcgagaccggcgagaucgugugggacaagggccgggacuucgccaccgugcggaaggugcuguccaugccccaggug |
| | | aacaucgugaagaagaccgaggugcagaccggcggcuucuccaaggaguccauccugcccaagcggaacuccgacaagcugaucgcccgga |
| | | agaaggacugggaccccaagaaguacggcggcuucgacucccccaccguggccuacuccgugcuggugguggccaagguggagaagggcaa |
| | | guccaagaagcugaaguccgugaaggagcugcugggcaucaccaucauggagcgguccuccuucgagaagaaccccaucgacuuccuggag |
| | | gccaagggcuacaaggaggugaagaaggaccugaucaucaagcugcccaaguacucccuguucgagcuggagaacggccggaagcggaugc |
| | | uggccuccgccggcgagcugcagaagggcaacgagcuggcccugcccuccaaguacgugaacuuccuguaccuggccucccacuacgagaa |
| | | gcugaagggcucccccgaggacaacgagcagaagcagcuguucguggagcagcacaagcacuaccuggacgagaucaucgagcagaucucc |
| | | gaguucuccaagcgggugauccuggccgacgccaaccuggacaaggugcuguccgccuacaacaagcaccgggacaagcccauccgggagc |
| | | aggccgagaacaucauccaccuguucacccugaccaaccugggcgcccccgccgccuucaaguacuucgacaccaccaucgacAAGaagcg |
| | | guacaccuccaccaaggaggugcuggacgccacccugauccaccaguccaucaccggccuguacgagacccggaucgaccugucccagcug |
| | | ggcggcgacGGCgccCCCgagUCCgccACCgagUCCggcGGCaccUCCaccGAGuccGAGggcUCCgccGGCaccUCCaccGAGuccGAGg |
| | | gcuccGCCggcUCCgccGGCuccaccUCCaccGAGgagGGCaccUCCaccGAGuccGAGggcuccGCCggcACCuccACCgaguccgagGG |
| | | CuccGCCggcACCuccGAGuccgccACCgagUCCggcGGCaccUCCaccGAGuccGAGggcUCCuccUCCggugccgccuucaagcccaac |
| | | cccaucaacuacauccugggccuggacaucggcaucgccuccgugggcugggccaugguggagaucgacgaggaggagaaccccauccggc |
| | | ugaucgaccugggcgugcggguguucgagcgggccgaggugcccaagaccggcgacucccuggccauggcccggcggcuggcccgguccgu |
| | | gcggcggcugacccggcggcgggcccaccggcugcugcgggcccggcggcugcugaagcgggagggcgugcugcaggccgccgacuucgac |
| | | gagaacggccugaucaagucccugcccaacacccccuggcagcugcgggccgccgcccuggaccggaagcugaccccccuggagugguccg |
| | | ccgugcugcugcaccugaucaagcaccggggcuaccugucccagcggaagaacgagggcgagaccgccgacaaggagcugggcgcccugcu |
| | | gaagggcguggccaacaacgcccacgcccugcagaccggcgacuuccggacccccgccgagcuggcccugaacaaguucgagaaggagucc |
| | | ggccacauccggaaccagcggggcgacuacucccacaccuucucccggaaggaccugcaggccgagcugauccugcuguucgagaagcaga |
| | | aggaguucggcaacccccacguguccggcggccugaaggagggcaucgagacccugcugaugacccagcggcccgcccuguccggcgacgc |
| | | cgugcagaagaugcugggccacugcaccuucgagcccgccgagcccaaggccgccaagaacaccuacaccgccgagcgguucaucuggcug |
| | | accaagcugaacaaccugcggauccuggagcagggcuccgagcggccccugaccgacaccgagcgggccacccugauggacgagcccuacc |
| | | ggaaguccaagcugaccuacgcccaggcccggaagcugcugggccuggaggacaccgccuucuucaagggccugcgguacggcaaggacaa |
| | | cgccgaggccuccacccugauggagaugaaggccuaccacgccaucucccgggcccuggagaaggagggccugaaggacaagaaguccccc |
| | | cugaaccuguccuccgagcugcaggacgagaucggcaccgccuucucccuguucaagaccgacgaggacaucaccggccggcugaaggacc |
| | | gggugcagcccgagauccuggaggcccugcugaagcacaucuccuucgacaaguucgugcagaucucccugaaggcccugcggcggaucgu |
| | | gccccugauggagcagggcaagcgguacgacgaggccugcgccgagaucuacggcgaccacuacggcaagaagaacaccgaggagaagauc |
| | | uaccugccccccauccccgccgacgagauccggaaccccguggugcugcgggcccugucccaggcccggaaggugaucaacggcguggugc |
| | | ggcgguacggcucccccgcccggauccacaucgagaccgcccgggaggugggcaaguccuucaaggaccggaaggagaucgagaagcggca |
| | | ggaggagaaccggaaggaccgggagaaggccgccgccaaguuccgggaguacuuccccaacuucgugggcgagcccaaguccaaggacauc |
| | | cugaagcugcggcuguacgagcagcagcacggcaagugccuguacuccggcaaggagaucaaccuggugcggcugaacgagaagggcuacg |
| | | uggagaucgaccacgcccugcccuucucccggaccugggacgacuccuucaacaacaaggugcuggugcugggcuccgagaaccagaacaa |
| | | gggcaaccagacccccuacgaguacuucaacggcaaggacaacucccgggaguggcaggaguucaaggcccggguggagaccucccgguuc |
| | | ccccgguccaagaagcagcggauccugcugcagaaguucgacgaggacggcuucaaggagugcaaccugaacgacacccgguacgugaacc |
| | | gcuuccugugccaguucguggccgaccacauccugcugaccggcaagggcaagcggcggguguucgccuccaacggccagaucaccaaccu |
| | | gcugcggggcuucuggggccugcggaaggugcgggccgagaacgaccggcaccacgcccuggacgccguggugguggccugcuccaccgug |
| | | gccaugcagcagaagaucacccgguucgugcgguacaaggagaugaacgccuucgacggcaagaccaucgacaaggagaccggcaaggugc |
| | | ugcaccagaagacccacuucccccagcccugggaguucuucgcccaggaggugaugauccggguguucggcaagcccgacggcaagcccga |
| | | guucgaggaggccgacacccccgagaagcugcggacccugcuggccgagaagcuguccucccggcccgaggccgugcacgaguacgugacc |
| | | ccccuguucgugucccgggcccccaaccggaagauguccggcgcccacaaggacacccugcgguccgccaagcgguucgugaagcacaacg |
| | | agaagaucuccgugaagcggguguggcugaccgagaucaagcuggccgaccuggagaacauggugaacuacaagaacggccgggagaucga |
| | | gcuguacgaggcccugaaggcccggcuggaggccuacggcggcaacgccaagcaggccuucgaccccaaggacaaccccuucuacaagaag |
| | | ggcggccagcuggugaaggccgugcggguggagaagacccaggaguccggcgugcugcugaacaagaagaacgccuacaccaucgccgaca |
| | | acggcgacauggugcggguggacguguucugcaagguggacaagaagggcaagaaccaguacuucaucgugcccaucuacgccuggcaggu |
| | | ggccgagaacauccugcccgacaucgacugcaagggcuaccggaucgacgacuccuacaccuucugcuucucccugcacaaguacgaccug |
| | | aucgccuuccagaaggacgagaaguccaagguggaguucgccuacuacaucaacugcgacuccuccaacggccgguucuaccuggccuggc |
| | | acgacaagggcuccaaggagcagcaguuccggaucuccacccagaaccuggugcugauccagaaguaccaggugaacgagcugggcaagga |
| | | gauccggcccugccggcugaagaagcggccccccgugcgguccggaaagcggaccgccgacggcuccgaguucgagucccccaagaagaag |
| | | cggaagguggagAGCGAAAGCGCAACACCGGAAAGCGUCAGCGGAUGGAGACUGUUCAAGAAGAUCAGCuag |
| 5 | Cas9- | MDKKYSIGLDIGTNSVGWAVITDEYKVPSKKFKVLGNTDRHSIKKNLIGALLFDSGETAEATRLKRTARRRYTRRKNRICYLQEIFSNEMA |
| | Cas9 | KVDDSFFHRLEESFLVEEDKKHERHPIFGNIVDEVAYHEKYPTIYHLRKKLVDSTDKADLRLIYLALAHMIKFRGHFLIEGDLNPDNSDVD |
| | fusion | KLFIQLVQTYNQLFEENPINASGVDAKAILSARLSKSRRLENLIAQLPGEKKNGLFGNLIALSLGLTPNFKSNFDLAEDAKLQLSKDTYDD |
| | (mRNA A | DLDNLLAQIGDQYADLFLAAKNLSDAILLSDILRVNTEITKAPLSASMIKRYDEHHQDLTLLKALVRQQLPEKYKEIFFDQSKNGYAGYID |
| | with | GGASQEEFYKFIKPILEKMDGTEELLVKLNREDLLRKQRTFDNGSIPHQIHLGELHAILRRQEDFYPFLKDNREKIEKILTFRIPYYVGPL |
| | HiBit | ARGNSRFAWMTRKSEETITPWNFEEVVDKGASAQSFIERMTNFDKNLPNEKVLPKHSLLYEYFTVYNELTKVKYVTEGMRKPAFLSGEQKK |
| | tag)- | AIVDLLFKTNRKVTVKQLKEDYFKKIECFDSVEISGVEDRFNASLGTYHDLLKIIKDKDFLDNEENEDILEDIVLTLTLFEDREMIEERLK |
| | amino | TYAHLFDDKVMKQLKRRRYTGWGRLSRKLINGIRDKQSGKTILDFLKSDGFANRNFMQLIHDDSLTFKEDIQKAQVSGQGDSLHEHIANLA |
| | acid | GSPAIKKGILQTVKVVDELVKVMGRHKPENIVIEMARENQTTQKGQKNSRERMKRIEEGIKELGSQILKEHPVENTQLQNEKLYLYYLQNG |
| | sequence | RDMYVDQELDINRLSDYDVDHIVPQSFLKDDSIDNKVLTRSDKNRGKSDNVPSEEVVKKMKNYWRQLLNAKLITQRKFDNLTKAERGGLSE |
| | | LDKAGFIKRQLVETRQITKHVAQILDSRMNTKYDENDKLIREVKVITLKSKLVSDFRKDFQFYKVREINNYHHAHDAYLNAVVGTALIKKY |
| | | PKLESEFVYGDYKVYDVRKMIAKSEQEIGKATAKYFFYSNIMNFFKTEITLANGEIRKRPLIETNGETGEIVWDKGRDFATVRKVLSMPQV |
| | | NIVKKTEVQTGGFSKESILPKRNSDKLIARKKDWDPKKYGGFDSPTVAYSVLVVAKVEKGKSKKLKSVKELLGITIMERSSFEKNPIDFLE |
| | | AKGYKEVKKDLIIKLPKYSLFELENGRKRMLASAGELQKGNELALPSKYVNFLYLASHYEKLKGSPEDNEQKQLFVEQHKHYLDEIIEQIS |
| | | EFSKRVILADANLDKVLSAYNKHRDKPIREQAENIIHLFTLTNLGAPAAFKYFDTTIDKKRYTSTKEVLDATLIHQSITGLYETRIDLSQL |
| | | GGDGAPESATESGGTSTESEGSAGTSTESEGSAGSAGSTSTEEGTSTESEGSAGTSTESEGSAGTSESATESGGTSTESEGSSSGAAFKPN |
| | | PINYILGLDIGIASVGWAMVEIDEEENPIRLIDLGVRVFERAEVPKTGDSLAMARRLARSVRRLTRRRAHRLLRARRLLKREGVLQAADFD |
| | | ENGLIKSLPNTPWQLRAAALDRKLTPLEWSAVLLHLIKHRGYLSQRKNEGETADKELGALLKGVANNAHALQTGDFRTPAELALNKFEKES |
| | | GHIRNQRGDYSHTFSRKDLQAELILLFEKQKEFGNPHVSGGLKEGIETLLMTQRPALSGDAVQKMLGHCTFEPAEPKAAKNTYTAERFIWL |
| | | TKLNNLRILEQGSERPLTDTERATLMDEPYRKSKLTYAQARKLLGLEDTAFFKGLRYGKDNAEASTLMEMKAYHAISRALEKEGLKDKKSP |
| | | LNLSSELQDEIGTAFSLFKTDEDITGRLKDRVQPEILEALLKHISFDKFVQISLKALRRIVPLMEQGKRYDEACAEIYGDHYGKKNTEEKI |
| | | YLPPIPADEIRNPVVLRALSQARKVINGVVRRYGSPARIHIETAREVGKSFKDRKEIEKRQEENRKDREKAAAKFREYFPNFVGEPKSKDI |
| | | LKLRLYEQQHGKCLYSGKEINLVRLNEKGYVEIDHALPFSRTWDDSFNNKVLVLGSENQNKGNQTPYEYFNGKDNSREWQEFKARVETSRF |
| | | PRSKKQRILLQKFDEDGFKECNLNDTRYVNRFLCQFVADHILLTGKGKRRVFASNGQITNLLRGFWGLRKVRAENDRHHALDAVVVACSTV |
| | | AMQQKITRFVRYKEMNAFDGKTIDKETGKVLHQKTHFPQPWEFFAQEVMIRVFGKPDGKPEFEEADTPEKLRTLLAEKLSSRPEAVHEYVT |
| | | PLFVSRAPNRKMSGAHKDTLRSAKRFVKHNEKISVKRVWLTEIKLADLENMVNYKNGREIELYEALKARLEAYGGNAKQAFDPKDNPFYKK |
| | | GGQLVKAVRVEKTQESGVLLNKKNAYTIADNGDMVRVDVFCKVDKKGKNQYFIVPIYAWQVAENILPDIDCKGYRIDDSYTFCFSLHKYDL |
| | | IAFQKDEKSKVEFAYYINCDSSNGRFYLAWHDKGSKEQQFRISTQNLVLIQKYQVNELGKEIRPCRLKKRPPVRSGKRTADGSEFESPKKK |
| | | RKVESESATPESVSGWRLFKKIS* |
| 6 | Cas9- | augGACGGCUCCGGCGGCGGCUCCCCCAAGAAGAAGCGGAAGGUGGGCGGCUCCGGCGGCGGCgccgccuucaagcccaaccccaucaacu |
| | Cas9 | acauccugggccuggacaucggcaucgccuccgugggcugggccaugguggagaucgacgaggaggagaaccccauccggcugaucgaccu |
| | fusion | gggcgugcggguguucgagcgggccgaggugcccaagaccggcgacucccuggccauggcccggcggcuggcccgguccgugcggcggcug |
| | (mRNA B)- | acccggcggcgggcccaccggcugcugcgggcccggcggcugcugaagcgggagggcgugcugcaggccgccgacuucgacgagaacggcc |
| | ORF | ugaucaagucccugcccaacacccccuggcagcugcgggccgccgcccuggaccggaagcugaccccccuggagugguccgccgugcugcu |
| | sequence | gcaccugaucaagcaccggggcuaccugucccagcggaagaacgagggcgagaccgccgacaaggagcugggcgcccugcugaagggcgug |
| | | gccaacaacgcccacgcccugcagaccggcgacuuccggacccccgccgagcuggcccugaacaaguucgagaaggaguccggccacaucc |
| | | ggaaccagcggggcgacuacucccacaccuucucccggaaggaccugcaggccgagcugauccugcuguucgagaagcagaaggaguucgg |
| | | caacccccacguguccggcggccugaaggagggcaucgagacccugcugaugacccagcggcccgcccuguccggcgacgccgugcagaag |
| | | augcugggccacugcaccuucgagcccgccgagcccaaggccgccaagaacaccuacaccgccgagcgguucaucuggcugaccaagcuga |
| | | acaaccugcggauccuggagcagggcuccgagcggccccugaccgacaccgagcgggccacccugauggacgagcccuaccggaaguccaa |
| | | gcugaccuacgcccaggcccggaagcugcugggccuggaggacaccgccuucuucaagggccugcgguacggcaaggacaacgccgaggcc |
| | | uccacccugauggagaugaaggccuaccacgccaucucccgggcccuggagaaggagggccugaaggacaagaaguccccccugaaccugu |
| | | ccuccgagcugcaggacgagaucggcaccgccuucucccuguucaagaccgacgaggacaucaccggccggcugaaggaccgggugcagcc |
| | | cgagauccugcgaggcccugcugaagcacaucuccuucgacaaguucgugcagaucucccugaaggcccugggcggaucgugccccugaug |
| | | gagcagggcaagcgguacgacgaggccugcgccgagaucuacggcgaccacuacggcaagaagaacaccgaggagaagaucuaccugcccc |
| | | ccauccccgccgacgagauccggaaccccguggugcugcgggcccugucccaggcccggaaggugaucaacggcguggugcggcgguacgg |
| | | cucccccgcccggauccacaucgagaccgcccgggaggugggcaaguccuucaaggaccggaaggagaucgagaagcggcaggaggagaac |
| | | cggaaggaccgggagaaggccgccgccaaguuccgggaguacuuccccaacuucgugggcgagcccaaguccaaggacauccugaagcugc |
| | | ggcuguacgagcagcagcacggcaagugccuguacuccggcaaggagaucaaccuggugcggcugaacgagaagggcuacguggagaucga |
| | | ccacgcccugcccuucucccggaccugggacgacuccuucaacaacaaggugcuggugcugggcuccgagaaccagaacaagggcaaccag |
| | | acccccuacgaguacuucaacggcaaggacaacucccgggaguggcaggaguucaaggcccggguggagaccucccgguucccccggucca |
| | | agaagcagcggauccugcugcagaaguucgacgaggacggcuucaaggagugcaaccugaacgacacccgguacgugaaccgguuccugug |
| | | ccaguucguggccgaccacauccugcugaccggcaagggcaagcggggguguucgccuccaacggccagaucaccaaccugcugcgggcgc |
| | | uucuggggccugcggaaggugcgggccgagaacgaccggcaccacgcccuggacgccguggugguggccugcuccaccguggccaugcagc |
| | | agaagaucacccgguucgugcgguacaaggagaugaacgccuucgacggcaagaccaucgacaaggagaccggcaaggugcugcaccagaa |
| | | gacccacuucccccagcccugggaguucuucgcccaggaggugaugauccggguguucggcaagcccgacggcaagcccgaguucgaggag |
| | | gccgacacccccgagaagcugcggacccugcuggccgagaagcuguccucccggcccgaggccgugcacgaguacgugaccccccuguucg |
| | | ugucccgggcccccaaccggaagauguccggcgcccacaaggacacccugcgguccgccaagcgguucgugaagcacaacgagaagaucuc |
| | | cgugaagcggguguggcugaccgagaucaagcuggccgaccuggagaacauggugaacuacaagaacggccgggagaucgagcuguacgag |
| | | gcccugaaggcccggcuggaggccuacggcggcaacgccaagcaggccuucgaccccaaggacaaccccuucuacaagaagggcggccagc |
| | | uggugaaggccgugcggguggagaagacccaggaguccggcgugcugcugaacaagaagaacgccuacaccaucgccgacaacggcgacau |
| | | ggugcggguggacguguucugcaagguggacaagaagggcaagaaccaguacuucaucgugcccaucuacgccuggcagguggccgagaac |
| | | auccugcccgacaucgacugcaagggcuaccggaucgacgacuccuacaccuucugcuucucccugcacaaguacgaccugaucgccuucc |
| | | agaaggacgagaaguccaagguggaguucgccuacuacaucaacugcgacuccuccaacggccgguucuaccuggccuggcacgacaaggg |
| | | cuccaaggagcagcaguuccggaucuccacccagaaccuggugcugauccagaaguaccaggugaacgagcugggcaaggagauccggccc |
| | | ugccggcugaagaagcggccccccgugcggGGCGCCCCCGAGUCCGCCACCGAGUCCGGCGGCACCUCCACCGAGUCCGAGGGCUCCGCCG |
| | | GCACCUCCACCGAGUCCGAGGGCUCCGCCGGCUCCGCCGGCUCCACCUCCGGCUCCUCCUCCGGCGACAAGAAGUACUCCAUCGGCCUGGA |
| | | CAUCGGCACCAACUCCGUGGGCUGGGCCGUGAUCACCGACGAGUACAAGGUGCCCUCCAAGAAGUUCAAGGUGCUGGGCAACACCGACCGG |
| | | CACUCCAUCAAGAAGAACCUGAUCGGCGCCCUGCUGUUCGACUCCGGCGAGACCGCCGAGGCCACCCGGCUGAAGCGGACCGCCCGGCGGC |
| | | GGUACACCCGGCGGAAGAACCGGAUCUGCUACCUGCAGGAGAUCUUCUCCAACGAGAUGGCCAAGGUGGACGACUCCUUCUUCCACCGGCU |
| | | GGAGGAGUCCUUCCUGGUGGAGGAGGACAAGAAGCACGAGCGGCACCCCAUCUUCGGCAACAUCGUGGACGAGGUGGCCUACCACGAGAAG |
| | | UACCCCACCAUCUACCACCUGCGGAAGAAGCUGGUGGACUCCACCGACAAGGCCGACCUGCGGCUGAUCUACCUGGCCCUGGCCCACAUGA |
| | | UCAAGUUCCGGGGCCACUUCCUGAUCGAGGGCGACCUGAACCCCGACAACUCCGACGUGGACAAGCUGUUCAUCCAGCUGGUGCAGACCUA |
| | | CAACCAGCUGUUCGAGGAGAACCCCAUCAACGCCUCCGGCGUGGACGCCAAGGCCAUCCUGUCCGCCCGGCUGUCCAAGUCCCGGCGGCUG |
| | | GAGAACCUGAUCGCCCAGCUGCCCGGCGAGAAGAAGAACGGCCUGUUCGGCAACCUGAUCGCCCUGUCCCUGGGCCUGACCCCCAACUUCA |
| | | AGUCCAACUUCGACCUGGCCGAGGACGCCAAGCUGCAGCUGUCCAAGGACACCUACGACGACGACCUGGACAACCUGCUGGCCCAGAUCGG |
| | | CGACCAGUACGCCGACCUGUUCCUGGCCGCCAAGAACCUGUCCGACGCCAUCCUGCUGUCCGACAUCCUGCGGGUGAACACCGAGAUCACC |
| | | AAGGCCCCCCUGUCCGCCUCCAUGAUCAAGCGGUACGACGAGCACCACCAGGACCUGACCCUGCUGAAGGCCCUGGUGCGGCAGCAGCUGC |
| | | CCGAGAAGUACAAGGAGAUCUUCUUCGACCAGUCCAAGAACGGCUACGCCGGCUACAUCGACGGCGGCGCCUCCCAGGAGGAGUUCUACAA |
| | | GUUCAUCAAGCCCAUCCUGGAGAAGAUGGACGGCACCGAGGAGCUGCUGGUGAAGCUGAACCGGGAGGACCUGCUGCGGAAGCAGCGGACC |
| | | UUCGACAACGGCUCCAUCCCCCACCAGAUCCACCUGGGCGAGCUGCACGCCAUCCUGCGGCGGCAGGAGGACUUCUACCCCUUCCUGAAGG |
| | | ACAACCGGGAGAAGAUCGAGAAGAUCCUGACCUUCCGGAUCCCCUACUACGUGGGCCCCCUGGCCCGGGGCAACUCCCGGUUCGCCUGGAU |
| | | GACCCGGAAGUCCGAGGAGACCAUCACCCCCUGGAACUUCGAGGAGGUGGUGGACAAGGGCGCCUCCGCCCAGUCCUUCAUCGAGCGGAUG |
| | | ACCAACUUCGACAAGAACCUGCCCAACGAGAAGGUGCUGCCCAAGCACUCCCUGCUGUACGAGUACUUCACCGUGUACAACGAGCUGACCA |
| | | AGgugaaguacgugaccgagggcaugcggaagcccgccuuccuguccggcgagcagaagaaggccaucguggaccugcuguucaagaccaa |
| | | ccggaaggugaccgugaagcagcugaaggaggacuacuucaagaagaucgagugcuucgacuccguggagaucuccggcguggaggaccgg |
| | | uucaacgccucccugggcaccuaccacgaccugcugaagaucaucaaggacaaggacuuccuggacaacgaggagaacgaggacauccugg |
| | | aggacaucgugcugacccugacccuguucgaggaccgggagaugaucgaggagcggcugaagaccuacgcccaccuguucgacgacaaggu |
| | | gaugaagcagcugaagcggcggcgguacaccggcuggggccggcugucccggaagcugaucaacggcauccgggacaagcaguccggcaag |
| | | accauccuggacuuccugaaguccgacggcuucgccaaccggaacuucaugcagcugauccacgacgacucccugaccuucaaggaggaca |
| | | uccagaaggcccagguguccggccagggcgacucccugcacgagcacaucgccaaccuggccggcucccccgccaucaagaagggcauccu |
| | | gcagaccgugaaggugguggacgagcuggugaaggugaugggccggcacaagcccgagaacaucgugaucgagauggcccgggagaaccag |
| | | accacccagaagggccagaagaacucccgggagcggaugaagcggaucgaggagggcaucaaggagcugggcucccagauccugaaggagc |
| | | accccguggagaacacccagcugcagaacgagaagcuguaccuguacuaccugcagaacggccgggacauguacguggaccaggagcugga |
| | | caucaaccggcuguccgacuacgacguggaccacaucgugccccaguccuuccugaaggacgacuccaucgacaacaaggugcugacccgg |
| | | uccgacaagaaccggggcaaguccgacaacgugcccuccgaggagguggugaagaagaugaagaacuacuggcggcagcugcugaacgcca |
| | | agcugaucacccagcggaaguucgacaaccugaccaaggccgagcggggcggccuguccgagcuggacaaggccggcuucaucaagcggca |
| | | gcugguggagacccggcagaucaccaagcacguggcccagauccuggacucccggaugaacaccaaguacgacgagaacgacaagcugauc |
| | | cgggaggugaaggugaucacccugaaguccaagcugguguccgacuuccggaaggacuuccaguucuacaagguggcggagaucaacaacu |
| | | accaccacgcccacgacgccuaccugaacgccguggugggcaccgcccugaucaagaaguaccccaagcuggaguccgaguucguguacgg |
| | | cgacuacaagguguacgacgugcggaagaugaucgccaaguccgagcaggagaucggcaaggccaccgccaaguacuucuucuacuccaac |
| | | aucaugaacuucuucaagaccgagaucacccuggccaacggcgagauccggaagcggccccugaucgagaccaacggcgagaccggcgaga |
| | | ucgugugggacaagggccgggacuucgccaccgugcggaaggugcuguccaugccccaggugaacaucgugaagaagaccgaggugcagac |
| | | cggcggcuucuccaaggaguccauccugcccaagcggaacuccgacaagcugaucgcccggaagaaggacugggaccccaagaaguacggc |
| | | ggcuucgacucccccaccguggccuacuccgugcuggugguggccaagguggagaagggcaaguccaagaagcugaaguccgugaaggagc |
| | | ugcugggcaucaccaucauggagcgguccuccuucgagaagaaccccaucgacuuccuggaggccaagggcuacaaggaggugaagaagga |
| | | ccugaucaucaagcugcccaaguacucccuguucgagcuggagaacggccggaagcggaugcuggccuccgccggcgagcugcagaagggc |
| | | aacgagcuggcccugcccuccaaguacgugaacuuccuguaccuggccucccacuacgagaagcugaagggcucccccgaggacaacgagc |
| | | agaagcagcuguucguggagcagcacaagcacuaccuggacgagaucaucgagcagaucuccgaguucuccaagcgggugauccuggccga |
| | | cgccaaccuggacaaggugcuguccgccuacaacaagcaccgggacaagcccauccgggagcaggccgagaacaucauccaccuguucacc |
| | | cugaccaaccugggcgcccccgccgccuucaaguacuucgacaccaccaucgacAAGaagcgguacaccuccaccaaggaggugcuggacg |
| | | ccacccugauccaccaguccaucaccggccuguacgagacccggaucgaccugucccagcugggcggcgacGGCGGCGGCUCCCCCAAGAA |
| | | GAAGCGGAAGGUGuag |
| 7 | Cas9- | MDGSGGGSPKKKRKVGGSGGGAAFKPNPINYILGLDIGIASVGWAMVEIDEEENPIRLIDLGVRVFERAEVPKTGDSLAMARRLARSVRRL |
| | Cas9 | TRRRAHRLLRARRLLKREGVLQAADFDENGLIKSLPNTPWQLRAAALDRKLTPLEWSAVLLHLIKHRGYLSQRKNEGETADKELGALLKGV |
| | fusion | ANNAHALQTGDFRTPAELALNKFEKESGHIRNQRGDYSHTFSRKDLQAELILLFEKQKEFGNPHVSGGLKEGIETLLMTQRPALSGDAVQK |
| | (mRNA B)- | MLGHCTFEPAEPKAAKNTYTAERFIWLTKLNNLRILEQGSERPLTDTERATLMDEPYRKSKLTYAQARKLLGLEDTAFFKGLRYGKDNAEA |
| | amino | STLMEMKAYHAISRALEKEGLKDKKSPLNLSSELQDEIGTAFSLFKTDEDITGRLKDRVQPEILEALLKHISFDKFVQISLKALRRIVPLM |
| | acid | EQGKRYDEACAEIYGDHYGKKNTEEKIYLPPIPADEIRNPVVLRALSQARKVINGVVRRYGSPARIHIETAREVGKSFKDRKEIEKRQEEN |
| | sequence | RKDREKAAAKFREYFPNFVGEPKSKDILKLRLYEQQHGKCLYSGKEINLVRLNEKGYVEIDHALPFSRTWDDSFNNKVLVLGSENQNKGNQ |
| | | TPYEYFNGKDNSREWQEFKARVETSRFPRSKKQRILLQKFDEDGFKECNLNDTRYVNRFLCQFVADHILLTGKGKRRVFASNGQITNLLRG |
| | | FWGLRKVRAENDRHHALDAVVVACSTVAMQQKITRFVRYKEMNAFDGKTIDKETGKVLHQKTHFPQPWEFFAQEVMIRVFGKPDGKPEFEE |
| | | ADTPEKLRTLLAEKLSSRPEAVHEYVTPLFVSRAPNRKMSGAHKDTLRSAKRFVKHNEKISVKRVWLTEIKLADLENMVNYKNGREIELYE |
| | | ALKARLEAYGGNAKQAFDPKDNPFYKKGGQLVKAVRVEKTQESGVLLNKKNAYTIADNGDMVRVDVFCKVDKKGKNQYFIVPIYAWQVAEN |
| | | ILPDIDCKGYRIDDSYTFCFSLHKYDLIAFQKDEKSKVEFAYYINCDSSNGRFYLAWHDKGSKEQQFRISTQNLVLIQKYQVNELGKEIRP |
| | | CRLKKRPPVRGAPESATESGGTSTESEGSAGTSTESEGSAGSAGSTSGSSSGDKKYSIGLDIGTNSVGWAVITDEYKVPSKKFKVLGNTDR |
| | | HSIKKNLIGALLFDSGETAEATRLKRTARRRYTRRKNRICYLQEIFSNEMAKVDDSFFHRLEESFLVEEDKKHERHPIFGNIVDEVAYHEK |
| | | YPTIYHLRKKLVDSTDKADLRLIYLALAHMIKFRGHFLIEGDLNPDNSDVDKLFIQLVQTYNQLFEENPINASGVDAKAILSARLSKSRRL |
| | | ENLIAQLPGEKKNGLFGNLIALSLGLTPNFKSNFDLAEDAKLQLSKDTYDDDLDNLLAQIGDQYADLFLAAKNLSDAILLSDILRVNTEIT |
| | | KAPLSASMIKRYDEHHQDLTLLKALVRQQLPEKYKEIFFDQSKNGYAGYIDGGASQEEFYKFIKPILEKMDGTEELLVKLNREDLLRKQRT |
| | | FDNGSIPHQIHLGELHAILRRQEDFYPFLKDNREKIEKILTFRIPYYVGPLARGNSRFAWMTRKSEETITPWNFEEVVDKGASAQSFIERM |
| | | TNFDKNLPNEKVLPKHSLLYEYFTVYNELTKVKYVTEGMRKPAFLSGEQKKAIVDLLFKTNRKVTVKQLKEDYFKKIECFDSVEISGVEDR |
| | | FNASLGTYHDLLKIIKDKDFLDNEENEDILEDIVLTLTLFEDREMIEERLKTYAHLFDDKVMKQLKRRRYTGWGRLSRKLINGIRDKQSGK |
| | | TILDFLKSDGFANRNFMQLIHDDSLTFKEDIQKAQVSGQGDSLHEHIANLAGSPAIKKGILQTVKVVDELVKVMGRHKPENIVIEMARENQ |
| | | TTQKGQKNSRERMKRIEEGIKELGSQILKEHPVENTQLQNEKLYLYYLQNGRDMYVDQELDINRLSDYDVDHIVPQSFLKDDSIDNKVLTR |
| | | SDKNRGKSDNVPSEEVVKKMKNYWRQLLNAKLITQRKFDNLTKAERGGLSELDKAGFIKRQLVETRQITKHVAQILDSRMNTKYDENDKLI |
| | | REVKVITLKSKLVSDFRKDFQFYKVREINNYHHAHDAYLNAVVGTALIKKYPKLESEFVYGDYKVYDVRKMIAKSEQEIGKATAKYFFYSN |
| | | IMNFFKTEITLANGEIRKRPLIETNGETGEIVWDKGRDFATVRKVLSMPQVNIVKKTEVQTGGFSKESILPKRNSDKLIARKKDWDPKKYG |
| | | GFDSPTVAYSVLVVAKVEKGKSKKLKSVKELLGITIMERSSFEKNPIDFLEAKGYKEVKKDLIIKLPKYSLFELENGRKRMLASAGELQKG |
| | | NELALPSKYVNFLYLASHYEKLKGSPEDNEQKQLFVEQHKHYLDEIIEQISEFSKRVILADANLDKVLSAYNKHRDKPIREQAENIIHLFT |
| | | LTNLGAPAAFKYFDTTIDKKRYTSTKEVLDATLIHQSITGLYETRIDLSQLGGDGGGSPKKKRKV* |
| 8 | Cas9- | GGGAAGCUCAGAAUAAACGCUCAACUUUGGCCGGAUCUGCCACCAUGGACGGCUCCGGCGGCGGCUCCCCCAAGAAGAAGCGGAAGGUGGG |
| | Cas9 | CGGCUCCGGCGGCGGCGCCGCCUUCAAGCCCAACCCCAUCAACUACAUCCUGGGCCUGGACAUCGGCAUCGCCUCCGUGGGCUGGGCCAUG |
| | fusion | GUGGAGAUCGACGAGGAGGAGAACCCCAUCCGGCUGAUCGACCUGGGCGUGCGGGUGUUCGAGCGGGCCGAGGUGCCCAAGACCGGCGACU |
| | (mRNA B | CCCUGGCCAUGGCCCGGCGGCUGGCCCGGUCCGUGCGGCGGCUGACCCGGCGGCGGGCCCACCGGCUGCUGCGGGCCCGGCGGCUGCUGAA |
| | with | GCGGGAGGGCGUGCUGCAGGCCGCCGACUUCGACGAGAACGGCCUGAUCAAGUCCCUGCCCAACACCCCCUGGCAGCUGCGGGCCGCCGCC |
| | HiBit | CUGGACCGGAAGCUGACCCCCCUGGAGUGGUCCGCCGUGCUGCUGCACCUGAUCAAGCACCGGGGCUACCUGUCCCAGCGGAAGAACGAGG |
| | tag)- | GCGAGACCGCCGACAAGGAGCUGGGCGCCCUGCUGAAGGGCGUGGCCAACAACGCCCACGCCCUGCAGACCGGCGACUUCCGGACCCCCGC |
| | mRNA | CGAGCUGGCCCUGAACAAGUUCGAGAAGGAGUCCGGCCACAUCCGGAACCAGCGGGGCGACUACUCCCACACCUUCUCCCGGAAGGACCUG |
| | sequence | CAGGCCGAGCUGAUCCUGCUGUUCGAGAAGCAGAAGGAGUUCGGCAACCCCCACGUGUCCGGCGGCCUGAAGGAGGGCAUCGAGACCCUGC |
| | | UGAUGACCCAGCGGCCCGCCCUGUCCGGCGACGCCGUGCAGAAGAUGCUGGGCCACUGCACCUUCGAGCCCGCCGAGCCCAAGGCCGCCAA |
| | | GAACACCUACACCGCCGAGCGGUUCAUCUGGCUGACCAAGCUGAACAACCUGCGGAUCCUGGAGCAGGGCUCCGAGCGGCCCCUGACCGAC |
| | | ACCGAGCGGGCCACCCUGAUGGACGAGCCCUACCGGAAGUCCAAGCUGACCUACGCCCAGGCCCGGAAGCUGCUGGGCCUGGAGGACACCG |
| | | CCUUCUUCAAGGGCCUGCGGUACGGCAAGGACAACGCCGAGGCCUCCACCCUGAUGGAGAUGAAGGCCUACCACGCCAUCUCCCGGGCCCU |
| | | GGAGAAGGAGGGCCUGAAGGACAAGAAGUCCCCCCUGAACCUGUCCUCCGAGCUGCAGGACGAGAUCGGCACCGCCUUCUCCCUGUUCAAG |
| | | ACCGACGAGGACAUCACCGGCCGGCUGAAGGACCGGGUGCAGCCCGAGAUCCUGGAGGCCCUGCUGAAGCACAUCUCCUUCGACAAGUUCG |
| | | UGCAGAUCUCCCUGAAGGCCCUGCGGCGGAUCGUGCCCCUGAUGGAGCAGGGCAAGCGGUACGACGAGGCCUGCGCCGAGAUCUACGGCGA |
| | | CCACUACGGCAAGAAGAACACCGAGGAGAAGAUCUACCUGCCCCCCAUCCCCGCCGACGAGAUCCGGAACCCCGUGGUGCUGCGGGCCCUG |
| | | UCCCAGGCCCGGAAGGUGAUCAACGGCGUGGUGCGGCGGUACGGCUCCCCCGCCCGGAUCCACAUCGAGACCGCCCGGGAGGUGGGCAAGU |
| | | CCUUCAAGGACCGGAAGGAGAUCGAGAAGCGGCAGGAGGAGAACCGGAAGGACCGGGAGAAGGCCGCCGCCAAGUUCCGGGAGUACUUCCC |
| | | CAACUUCGUGGGCGAGCCCAAGUCCAAGGACAUCCUGAAGCUGCGGCUGUACGAGCAGCAGCACGGCAAGUGCCUGUACUCCGGCAAGGAG |
| | | AUCAACCUGGUGCGGCUGAACGAGAAGGGCUACGUGGAGAUCGACCACGCCCUGCCCUUCUCCCGGACCUGGGACGACUCCUUCAACAACA |
| | | AGGUGCUGGUGCUGGGCUCCGAGAACCAGAACAAGGGCAACCAGACCCCCUACGAGUACUUCAACGGCAAGGACAACUCCCGGGAGUGGCA |
| | | GGAGUUCAAGGCCCGGGUGGAGACCUCCCGGUUCCCCCGGUCCAAGAAGCAGCGGAUCCUGCUGCAGAAGUUCGACGAGGACGGCUUCAAG |
| | | GAGUGCAACCUGAACGACACCCGGUACGUGAACCGGUUCCUGUGCCAGUUCGUGGCCGACCACAUCCUGCUGACCGGCAAGGGCAAGCGGC |
| | | GGGUGUUCGCCUCCAACGGCCAGAUCACCAACCUGCUGCGGGGCUUCUGGGGCCUGCGGAAGGUGCGGGCCGAGAACGACCGGCACCACGC |
| | | CCUGGACGCCGUGGUGGUGGCCUGCUCCACCGUGGCCAUGCAGCAGAAGAUCACCCGGUUCGUGCGGUACAAGGAGAUGAACGCCUUCGAC |
| | | GGCAAGACCAUCGACAAGGAGACCGGCAAGGUGCUGCACCAGAAGACCCACUUCCCCCAGCCCUGGGAGUUCUUCGCCCAGGAGGUGAUGA |
| | | UCCGGGUGUUCGGCAAGCCCGACGGCAAGCCCGAGUUCGAGGAGGCCGACACCCCCGAGAAGCUGCGGACCCUGCUGGCCGAGAAGCUGUC |
| | | CUCCCGGCCCGAGGCCGUGCACGAGUACGUGACCCCCCUGUUCGUGUCCCGGGCCCCCAACCGGAAGAUGUCCGGCGCCCACAAGGACACC |
| | | CUGCGGUCCGCCAAGCGGUUCGUGAAGCACAACGAGAAGAUCUCCGUGAAGCGGGUGUGGCUGACCGAGAUCAAGCUGGCCGACCUGGAGA |
| | | ACAUGGUGAACUACAAGAACGGCCGGGAGAUCGAGCUGUACGAGGCCCUGAAGGCCCGGCUGGAGGCCUACGGCGGCAACGCCAAGCAGGC |
| | | CUUCGACCCCAAGGACAACCCCUUCUACAAGAAGGGCGGCCAGCUGGUGAAGGCCGUGCGGGUGGAGAAGACCCAGGAGUCCGGCGUGCUG |
| | | CUGAACAAGAAGAACGCCUACACCAUCGCCGACAACGGCGACAUGGUGCGGGUGGACGUGUUCUGCAAGGUGGACAAGAAGGGCAAGAACC |
| | | AGUACUUCAUCGUGCCCAUCUACGCCUGGCAGGUGGCCGAGAACAUCCUGCCCGACAUCGACUGCAAGGGCUACCGGAUCGACGACUCCUA |
| | | CACCUUCUGCUUCUCCCUGCACAAGUACGACCUGAUCGCCUUCCAGAAGGACGAGAAGUCCAAGGUGGAGUUCGCCUACUACAUCAACUGC |
| | | GACUCCUCCAACGGCCGGUUCUACCUGGCCUGGCACGACAAGGGCUCCAAGGAGCAGCAGUUCCGGAUCUCCACCCAGAACCUGGUGCUGA |
| | | UCCAGAAGUACCAGGUGAACGAGCUGGGCAAGGAGAUCCGGCCCUGCCGGCUGAAGAAGCGGCCCCCCGUGCGGGGCGCCCCCGAGUCCGC |
| | | CACCGAGUCCGGCGGCACCUCCACCGAGUCCGAGGGCUCCGCCGGCACCUCCACCGAGUCCGAGGGCUCCGCCGGCUCCGCCGGCUCCACC |
| | | UCCGGCUCCUCCUCCGGCGACAAGAAGUACUCCAUCGGCCUGGACAUCGGCACCAACUCCGUGGGCUGGGCCGUGAUCACCGACGAGUACA |
| | | AGGUGCCCUCCAAGAAGUUCAAGGUGCUGGGCAACACCGACCGGCACUCCAUCAAGAAGAACCUGAUCGGCGCCCUGCUGUUCGACUCCGG |
| | | CGAGACCGCCGAGGCCACCCGGCUGAAGCGGACCGCCCGGCGGCGGUACACCCGGCGGAAGAACCGGAUCUGCUACCUGCAGGAGAUCUUC |
| | | UCCAACGAGAUGGCCAAGGUGGACGACUCCUUCUUCCACCGGCUGGAGGAGUCCUUCCUGGUGGAGGAGGACAAGAAGCACGAGCGGCACC |
| | | CCAUCUUCGGCAACAUCGUGGACGAGGUGGCCUACCACGAGAAGUACCCCACCAUCUACCACCUGCGGAAGAAGCUGGUGGACUCCACCGA |
| | | CAAGGCCGACCUGCGGCUGAUCUACCUGGCCCUGGCCCACAUGAUCAAGUUCCGGGGCCACUUCCUGAUCGAGGGCGACCUGAACCCCGAC |
| | | AACUCCGACGUGGACAAGCUGUUCAUCCAGCUGGUGCAGACCUACAACCAGCUGUUCGAGGAGAACCCCAUCAACGCCUCCGGCGUGGACG |
| | | CCAAGGCCAUCCUGUCCGCCCGGCUGUCCAAGUCCCGGCGGCUGGAGAACCUGAUCGCCCAGCUGCCCGGCGAGAAGAAGAACGGCCUGUU |
| | | CGGCAACCUGAUCGCCCUGUCCCUGGGCCUGACCCCCAACUUCAAGUCCAACUUCGACCUGGCCGAGGACGCCAAGCUGCAGCUGUCCAAG |
| | | GACACCUACGACGACGACCUGGACAACCUGCUGGCCCAGAUCGGCGACCAGUACGCCGACCUGUUCCUGGCCGCCAAGAACCUGUCCGACG |
| | | CCAUCCUGCUGUCCGACAUCCUGCGGGUGAACACCGAGAUCACCAAGGCCCCCCUGUCCGCCUCCAUGAUCAAGCGGUACGACGAGCACCA |
| | | CCAGGACCUGACCCUGCUGAAGGCCCUGGUGCGGCAGCAGCUGCCCGAGAAGUACAAGGAGAUCUUCUUCGACCAGUCCAAGAACGGCUAC |
| | | GCCGGCUACAUCGACGGCGGCGCCUCCCAGGAGGAGUUCUACAAGUUCAUCAAGCCCAUCCUGGAGAAGAUGGACGGCACCGAGGAGCUGC |
| | | UGGUGAAGCUGAACCGGGAGGACCUGCUGCGGAAGCAGCGGACCUUCGACAACGGCUCCAUCCCCCACCAGAUCCACCUGGGCGAGCUGCA |
| | | CGCCAUCCUGCGGCGGCAGGAGGACUUCUACCCCUUCCUGAAGGACAACCGGGAGAAGAUCGAGAAGAUCCUGACCUUCCGGAUCCCCUAC |
| | | UACGUGGGCCCCCUGGCCCGGGGCAACUCCCGGUUCGCCUGGAUGACCCGGAAGUCCGAGGAGACCAUCACCCCCUGGAACUUCGAGGAGG |
| | | UGGUGGACAAGGGCGCCUCCGCCCAGUCCUUCAUCGAGCGGAUGACCAACUUCGACAAGAACCUGCCCAACGAGAAGGUGCUGCCCAAGCA |
| | | CUCCCUGCUGUACGAGUACUUCACCGUGUACAACGAGCUGACCAAGGUGAAGUACGUGACCGAGGGCAUGCGGAAGCCCGCCUUCCUGUCC |
| | | GGCGAGCAGAAGAAGGCCAUCGUGGACCUGCUGUUCAAGACCAACCGGAAGGUGACCGUGAAGCAGCUGAAGGAGGACUACUUCAAGAAGA |
| | | UCGAGUGCUUCGACUCCGUGGAGAUCUCCGGCGUGGAGGACCGGUUCAACGCCUCCCUGGGCACCUACCACGACCUGCUGAAGAUCAUCAA |
| | | GGACAAGGACUUCCUGGACAACGAGGAGAACGAGGACAUCCUGGAGGACAUCGUGCUGACCCUGACCCUGUUCGAGGACCGGGAGAUGAUC |
| | | GAGGAGCGGCUGAAGACCUACGCCCACCUGUUCGACGACAAGGUGAUGAAGCAGCUGAAGCGGCGGCGGUACACCGGCUGGGGCCGGCUGU |
| | | CCCGGAAGCUGAUCAACGGCAUCCGGGACAAGCAGUCCGGCAAGACCAUCCUGGACUUCCUGAAGUCCGACGGCUUCGCCAACCGGAACUU |
| | | CAUGCAGCUGAUCCACGACGACUCCCUGACCUUCAAGGAGGACAUCCAGAAGGCCCAGGUGUCCGGCCAGGGCGACUCCCUGCACGAGCAC |
| | | AUCGCCAACCUGGCCGGCUCCCCCGCCAUCAAGAAGGGCAUCCUGCAGACCGUGAAGGUGGUGGACGAGCUGGUGAAGGUGAUGGGCCGGC |
| | | ACAAGCCCGAGAACAUCGUGAUCGAGAUGGCCCGGGAGAACCAGACCACCCAGAAGGGCCAGAAGAACUCCCGGGAGCGGAUGAAGCGGAU |
| | | CGAGGAGGGCAUCAAGGAGCUGGGCUCCCAGAUCCUGAAGGAGCACCCCGUGGAGAACACCCAGCUGCAGAACGAGAAGCUGUACCUGUAC |
| | | UACCUGCAGAACGGCCGGGACAUGUACGUGGACCAGGAGCUGGACAUCAACCGGCUGUCCGACUACGACGUGGACCACAUCGUGCCCCAGU |
| | | CCUUCCUGAAGGACGACUCCAUCGACAACAAGGUGCUGACCCGGUCCGACAAGAACCGGGGCAAGUCCGACAACGUGCCCUCCGAGGAGGU |
| | | GGUGAAGAAGAUGAAGAACUACUGGCGGCAGCUGCUGAACGCCAAGCUGAUCACCCAGCGGAAGUUCGACAACCUGACCAAGGCCGAGCGG |
| | | GGCGGCCUGUCCGAGCUGGACAAGGCCGGCUUCAUCAAGCGGCAGCUGGUGGAGACCCGGCAGAUCACCAAGCACGUGGCCCAGAUCCUGG |
| | | ACUCCCGGAUGAACACCAAGUACGACGAGAACGACAAGCUGAUCCGGGAGGUGAAGGUGAUCACCCUGAAGUCCAAGCUGGUGUCCGACUU |
| | | CCGGAAGGACUUCCAGUUCUACAAGGUGCGGGAGAUCAACAACUACCACCACGCCCACGACGCCUACCUGAACGCCGUGGUGGGCACCGCC |
| | | CUGAUCAAGAAGUACCCCAAGCUGGAGUCCGAGUUCGUGUACGGCGACUACAAGGUGUACGACGUGCGGAAGAUGAUCGCCAAGUCCGAGC |
| | | AGGAGAUCGGCAAGGCCACCGCCAAGUACUUCUUCUACUCCAACAUCAUGAACUUCUUCAAGACCGAGAUCACCCUGGCCAACGGCGAGAU |
| | | CCGGAAGCGGCCCCUGAUCGAGACCAACGGCGAGACCGGCGAGAUCGUGUGGGACAAGGGCCGGGACUUCGCCACCGUGCGGAAGGUGCUG |
| | | UCCAUGCCCCAGGUGAACAUCGUGAAGAAGACCGAGGUGCAGACCGGCGGCUUCUCCAAGGAGUCCAUCCUGCCCAAGCGGAACUCCGACA |
| | | AGCUGAUCGCCCGGAAGAAGGACUGGGACCCCAAGAAGUACGGCGGCUUCGACUCCCCCACCGUGGCCUACUCCGUGCUGGUGGUGGCCAA |
| | | GGUGGAGAAGGGCAAGUCCAAGAAGCUGAAGUCCGUGAAGGAGCUGCUGGGCAUCACCAUCAUGGAGCGGUCCUCCUUCGAGAAGAACCCC |
| | | AUCGACUUCCUGGAGGCCAAGGGCUACAAGGAGGUGAAGAAGGACCUGAUCAUCAAGCUGCCCAAGUACUCCCUGUUCGAGCUGGAGAACG |
| | | GCCGGAAGCGGAUGCUGGCCUCCGCCGGCGAGCUGCAGAAGGGCAACGAGCUGGCCCUGCCCUCCAAGUACGUGAACUUCCUGUACCUGGC |
| | | CUCCCACUACGAGAAGCUGAAGGGCUCCCCCGAGGACAACGAGCAGAAGCAGCUGUUCGUGGAGCAGCACAAGCACUACCUGGACGAGAUC |
| | | AUCGAGCAGAUCUCCGAGUUCUCCAAGCGGGUGAUCCUGGCCGACGCCAACCUGGACAAGGUGCUGUCCGCCUACAACAAGCACCGGGACA |
| | | AGCCCAUCCGGGAGCAGGCCGAGAACAUCAUCCACCUGUUCACCCUGACCAACCUGGGCGCCCCCGCCGCCUUCAAGUACUUCGACACCAC |
| | | CAUCGACAAGAAGCGGUACACCUCCACCAAGGAGGUGCUGGACGCCACCCUGAUCCACCAGUCCAUCACCGGCCUGUACGAGACCCGGAUC |
| | | GACCUGUCCCAGCUGGGCGGCGACGGCGGCGGCUCCCCCAAGAAGAAGCGGAAGGUGUCCGAGUCCGCCACCCCCGAGUCCGUGUCCGGCU |
| | | GGCGGCUGUUCAAGAAGAUCUCCUAGCUAGCACCAGCCUCAAGAACACCCGAAUGGAGUCUCUAAGCUACAUAAUACCAACUUACACUUUA |
| | | CAAAAUGUUGUCCCCCAAAAUGUAGCCAUUCGUAUCUGCUCCUAAUAAAAAGAAAGUUUCUUCACAUUCUCUCGAGAAAAAAAAAAAAUGG |
| | | AAAAAAAAAAAACGGAAAAAAAAAAAAGGUAAAAAAAAAAAAUAUAAAAAAAAAAAACAUAAAAAAAAAAAACGAAAAAAAAAAAACGUAA |
| | | AAAAAAAAAACUCAAAAAAAAAAAGAUAAAAAAAAAAAACCUAAAAAAAAAAAAUGUAAAAAAAAAAAAGGGAAAAAAAAAAAACGCAAAA |
| | | AAAAAAAACACAAAAAAAAAAAAUGCAAAAAAAAAAAAUCGAAAAAAAAAAAAUCUAAAAAAAAAAAACGAAAAAAAAAAAACCCAAAAAA |
| | | AAAAAAGACAAAAAAAAAAAAUAGAAAAAAAAAAAGUUAAAAAAAAAAAACUGAAAAAAAAAAAAUUUAAAAAAAAAAAAUCUAG |
| 9 | Cas9- | augGACGGCUCCGGCGGCGGCUCCCCCAAGAAGAAGCGGAAGGUGGGCGGCUCCGGCGGCGGCgccgccuucaagcccaaccccaucaacu |
| | Cas9 | acauccugggccuggacaucggcaucgccuccgugggcugggccaugguggagaucgacgaggaggagaaccccauccggcugaucgaccu |
| | fusion | gggcgugcggguguucgagcgggccgaggugcccaagaccggcgacucccuggccauggcccggcggcuggcccgguccgugcggcggcug |
| | (mRNA B | acccggcgggcggcccaccggcugcugcgggcccggcggcugcugaagcgggagggcgugcugcaggccgccgacuucgacgagaacggcc |
| | with | ugaucaagucccugcccaacacccccuggcagcugcgggccgccgcccuggaccggaagcugaccccccuggagugguccgccgugcugcu |
| | HiBit | gcaccugaucaagcaccggggcuaccugucccagcggaagaacgagggcgagaccgccgacaaggagcugcgggcccugcugaagggcgug |
| | tag)- | gccaacaacgcccacgcccugcagaccggcgacuuccggacccccgccgagcuggcccugaacaaguucgagaaggaguccggccacaucc |
| | ORF | ggaaccagcggggcgacuacucccacaccuucucccggaaggaccugcaggccgagcugauccugcuguucgagaagcagaaggaguucgg |
| | sequence | caacccccacguguccggcggccugaaggagggcaucgagacccugcugaugacccagcggcccgcccuguccggcgacgccgugcagaag |
| | | augcugggccacugcaccuucgagcccgccgagcccaaggccgccaagaacaccuacaccgccgagcgguucaucuggcugaccaagcuga |
| | | acaaccugcggauccuggagcagggcuccgagcggccccugaccgacaccgagcgggccacccugauggacgagcccuaccggaaguccaa |
| | | gcugaccuacgcccaggcccggaagcugcugggccuggaggacaccgccuucuucaagggccugcgguacggcaaggacaacgccgaggcc |
| | | uccacccugauggagaugaaggccuaccacgccaucucccgggcccuggagaaggagggccugaaggacaagaaguccccccugaaccugu |
| | | ccuccgagcugcaggacgagaucggcaccgccuucucccuguucaagaccgacgaggacaucaccggccggcugaaggaccgggugcagcc |
| | | cgagauccuggaggcccugcugaagcacaucuccuucgacaaguucgugcagaucucccugaaggcccugcggcggaucgugccccugaug |
| | | gagcagggcaagcgguacgacgaggccugcgccgagaucuacggcgaccacuacggcaagaagaacaccgaggagaagaucuaccugcccc |
| | | ccauccccgccgacgagauccggaaccccguggugcugcgggcccugucccaggcccggaaggugaucaacggcguggugcggcgguacgg |
| | | cucccccgcccggauccacaucgagaccgcccgggaggugggcaaguccuucaaggaccggaaggagaucgagaagcggcaggaggagaac |
| | | cggaaggaccgggagaaggccgccgccaaguuccgggaguacuuccccaacuucgugggcgagcccaaguccaaggacauccugaagcugc |
| | | ggcuguacgagcagcagcacggcaagugccuguacuccggcaaggagaucaaccuggugcggcugaacgagaagggcuacguggagaucga |
| | | ccacgcccugcccuucucccggaccugggacgacuccuucaacaacaaggugcuggugcugggcuccgagaaccagaacaagggcaaccag |
| | | acccccuacgaguacuucaacggcaaggacaacucccgggaguggcaggaguucaaggcccggguggagaccucccgguucccccggucca |
| | | agaagcagcggauccugcugcagaaguucgacgaggacggcuucaaggagugcaaccugaacgacacccgguacgugaaccgguuccugug |
| | | ccaguucguggccgaccacauccugcugaccggcaagggcaagcggggguguucgccuccaacggccagaucaccaaccugcugcgcgggc |
| | | uucuggggccugcggaaggugcgggccgagaacgaccggcaccacgcccuggacgccguggugguggccugcuccaccguggccaugcagc |
| | | agaagaucacccgguucgugcgguacaaggagaugaacgccuucgacggcaagaccaucgacaaggagaccggcaaggugcugcaccagaa |
| | | gacccacuucccccagcccugggaguucuucgcccaggaggugaugauccggguguucggcaagcccgacggcaagcccgaguucgaggag |
| | | gccgacacccccgagaagcugcggacccugcuggccgagaagcuguccucccggcccgaggccgugcacgaguacgugaccccccuguucg |
| | | ugucccgggcccccaaccggaagauguccggcgcccacaaggacacccugcgguccgccaagcgguucgugaagcacaacgagaagaucuc |
| | | cgugaagcggguguggcugaccgagaucaagcuggccgaccuggagaacauggugaacuacaagaacggccgggagaucgagcuguacgag |
| | | gcccugaaggcccggcuggaggccuacggcggcaacgccaagcaggccuucgaccccaaggacaaccccuucuacaagaagggcggccagc |
| | | uggugaaggccgugcggguggagaagacccaggaguccggcgugcugcugaacaagaagaacgccuacaccaucgccgacaacggcgacau |
| | | ggugcggguggacguguucugcaagguggacaagaagggcaagaaccaguacuucaucgugcccaucuacgccuggcagguggccgagaac |
| | | auccugcccgacaucgacugcaagcggcuaccggaucgacgacuccuacaccuucugcuucucccugcacaaguacgaccugaugccuucc |
| | | agaaggacgagaaguccaagguggaguucgccuacuacaucaacugcgacuccuccaacggccgguucuaccuggccuggcacgacaaggg |
| | | cuccaaggagcagcaguuccggaucuccacccagaaccuggugcugauccagaaguaccaggugaacgagcugggcaaggagauccggccc |
| | | ugccggcugaagaagcggccccccgugcggGGCGCCCCCGAGUCCGCCACCGAGUCCGGCGGCACCUCCACCGAGUCCGAGGGCUCCGCCG |
| | | GCACCUCCACCGAGUCCGAGGGCUCCGCCGGCUCCGCCGGCUCCACCUCCGGCUCCUCCUCCGGCGACAAGAAGUACUCCAUCGGCCUGGA |
| | | CAUCGGCACCAACUCCGUGGGCUGGGCCGUGAUCACCGACGAGUACAAGGUGCCCUCCAAGAAGUUCAAGGUGCUGGGCAACACCGACCGG |
| | | CACUCCAUCAAGAAGAACCUGAUCGGCGCCCUGCUGUUCGACUCCGGCGAGACCGCCGAGGCCACCCGGCUGAAGCGGACCGCCCGGCGGC |
| | | GGUACACCCGGCGGAAGAACCGGAUCUGCUACCUGCAGGAGAUCUUCUCCAACGAGAUGGCCAAGGUGGACGACUCCUUCUUCCACCGGCU |
| | | GGAGGAGUCCUUCCUGGUGGAGGAGGACAAGAAGCACGAGCGGCACCCCAUCUUCGGCAACAUCGUGGACGAGGUGGCCUACCACGAGAAG |
| | | UACCCCACCAUCUACCACCUGCGGAAGAAGCUGGUGGACUCCACCGACAAGGCCGACCUGCGGCUGAUCUACCUGGCCCUGGCCCACAUGA |
| | | UCAAGUUCCGGGGCCACUUCCUGAUCGAGGGCGACCUGAACCCCGACAACUCCGACGUGGACAAGCUGUUCAUCCAGCUGGUGCAGACCUA |
| | | CAACCAGCUGUUCGAGGAGAACCCCAUCAACGCCUCCGGCGUGGACGCCAAGGCCAUCCUGUCCGCCCGGCUGUCCAAGUCCCGGCGGCUG |
| | | GAGAACCUGAUCGCCCAGCUGCCCGGCGAGAAGAAGAACGGCCUGUUCGGCAACCUGAUCGCCCUGUCCCUGGGCCUGACCCCCAACUUCA |
| | | AGUCCAACUUCGACCUGGCCGAGGACGCCAAGCUGCAGCUGUCCAAGGACACCUACGACGACGACCUGGACAACCUGCUGGCCCAGAUCGG |
| | | CGACCAGUACGCCGACCUGUUCCUGGCCGCCAAGAACCUGUCCGACGCCAUCCUGCUGUCCGACAUCCUGCGGGUGAACACCGAGAUCACC |
| | | AAGGCCCCCCUGUCCGCCUCCAUGAUCAAGCGGUACGACGAGCACCACCAGGACCUGACCCUGCUGAAGGCCCUGGUGCGGCAGCAGCUGC |
| | | CCGAGAAGUACAAGGAGAUCUUCUUCGACCAGUCCAAGAACGGCUACGCCGGCUACAUCGACGGCGGCGCCUCCCAGGAGGAGUUCUACAA |
| | | GUUCAUCAAGCCCAUCCUGGAGAAGAUGGACGGCACCGAGGAGCUGCUGGUGAAGCUGAACCGGGAGGACCUGCUGCGGAAGCAGCGGACC |
| | | UUCGACAACGGCUCCAUCCCCCACCAGAUCCACCUGGGCGAGCUGCACGCCAUCCUGCGGCGGCAGGAGGACUUCUACCCCUUCCUGAAGG |
| | | ACAACCGGGAGAAGAUCGAGAAGAUCCUGACCUUCCGGAUCCCCUACUACGUGGGCCCCCUGGCCCGGGGCAACUCCCGGUUCGCCUGGAU |
| | | GACCCGGAAGUCCGAGGAGACCAUCACCCCCUGGAACUUCGAGGAGGUGGUGGACAAGGGCGCCUCCGCCCAGUCCUUCAUCGAGCGGAUG |
| | | ACCAACUUCGACAAGAACCUGCCCAACGAGAAGGUGCUGCCCAAGCACUCCCUGCUGUACGAGUACUUCACCGUGUACAACGAGCUGACCA |
| | | AGgugaaguacgugaccgagggcaugcggaagcccgccuuccuguccggcgagcagaagaaggccaucguggaccugcuguucaagaccaa |
| | | ccggaaggugaccgugaagcagcugaaggaggacuacuucaagaagaucgagugcuucgacuccguggagaucuccggcguggaggaccgg |
| | | uucaacgccucccugggcaccuaccacgaccugcugaagaucaucaaggacaaggacuuccuggacaacgaggagaacgaggacauccugg |
| | | aggacaucgugcugacccugacccuguucgaggaccgggagaugaucgaggagcggcugaagaccuacgcccaccuguucgacgacaaggu |
| | | gaugaagcagcugaagcggcggcgguacaccggcuggggccggcugucccggaagcugaucaacggcauccgggacaagcaguccggcaag |
| | | accauccuggacuuccugaaguccgacggcuucgccaaccggaacuucaugcagcugauccacgacgacucccugaccuucaaggaggaca |
| | | uccagaaggcccagguguccggccagggcgacucccugcacgagcacaucgccaaccuggccggcucccccgccaucaagaagggcauccu |
| | | gcagaccgugaaggugguggacgagcuggugaaggugaugggccggcacaagcccgagaacaucgugaucgagauggcccgggagaaccag |
| | | accacccagaagggccagaagaacucccgggagcggaugaagcggaucgaggagggcaucaaggagcugggcucccagauccugaaggagc |
| | | accccguggagaacacccagcugcagaacgagaagcuguaccuguacuaccugcagaacggccgggacauguacguggaccaggagcugga |
| | | caucaaccggcuguccgacuacgacguggaccacaucgugccccaguccuuccugaaggacgacuccaucgacaacaaggugcugacccgg |
| | | uccgacaagaaccggggcaaguccgacaacgugcccuccgaggagguggcugaagaagaugaagaacuacuggggcagcugcugaacgcca |
| | | agcugaucacccagcggaaguucgacaaccugaccaaggccgagcggggcggccuguccgagcuggacaaggccggcuucaucaagcggca |
| | | gcugguggagacccggcagaucaccaagcacguggcccagauccuggacucccggaugaacaccaaguacgacgagaacgacaagcugauc |
| | | cgggaggugaaggugaucacccugaaguccaagcugguguccgacuuccggaaggacuuccaguucuacaaggugcgggagaucaacaacu |
| | | accaccacgcccacgacgccuaccugaacgccguggugggcaccgcccugaucaagaaguaccccaagcuggaguccgaguucguguacgg |
| | | cgacuacaagguguacgacgugcggaagaugaucgccaaguccgagcaggagaucggcaaggccaccgccaaguacuucuucuacuccaac |
| | | aucaugaacuucuucaagaccgagaucacccuggccaacggcgagauccggaagcggccccugaucgagaccaacggcgagaccggcgaga |
| | | ucgugugggacaagggccgggacuucgccaccgugcggaaggugcuguccaugccccaggugaacaucgugaagaagaccgaggugcagac |
| | | cggcggcuucuccaaggaguccauccugcccaagcggaacuccgacaagcugaucgcccggaagaaggacugggaccccaagaaguacggc |
| | | ggcuucgacucccccaccguggccuacuccgugcuggugguggccaagguggagaagggcaaguccaagaagcugaaguccgugaaggagc |
| | | ugcugggcaucaccaucauggagcgguccuccuucgagaagaaccccaucgacuuccuggaggccaagggcuacaaggaggugaagaagga |
| | | ccugaucaucaagcugcccaaguacucccuguucgagcuggagaacggccggaagcggaugcuggccuccgccggcgagcugcagaagggc |
| | | aacgagcuggcccugcccuccaaguacgugaacuuccuguaccuggccucccacuacgagaagcugaagggcucccccgaggacaacgagc |
| | | agaagcagcuguucguggagcagcacaagcacuaccuggacgagaucaucgagcagaucuccgaguucuccaaggcggugauccuggccga |
| | | cgccaaccuggacaaggugcuguccgccuacaacaagcaccgggacaagcccauccgggagcaggccgagaacaucauccaccuguucacc |
| | | cugaccaaccugggcgcccccgccgccuucaaguacuucgacaccaccaucgacAAGaagcgguacaccuccaccaaggaggugcuggacg |
| | | ccacccugauccaccaguccaucaccggccuguacgagacccggaucgaccugucccagcugggggcgacGGCGGCGGCUCCCCCAAGAA |
| | | GAAGCGGAAGGUGUCCGAGUCCGCCACCCCCGAGUCCGUGUCCGGCUGGCGGCUGUUCAAGAAGAUCUCCuag |
| 10 | Cas9- | MDGSGGGSPKKKRKVGGSGGGAAFKPNPINYILGLDIGIASVGWAMVEIDEEENPIRLIDLGVRVFERAEVPKTGDSLAMARRLARSVRRL |
| | Cas9 | TRRRAHRLLRARRLLKREGVLQAADFDENGLIKSLPNTPWQLRAAALDRKLTPLEWSAVLLHLIKHRGYLSQRKNEGETADKELGALLKGV |
| | fusion | ANNAHALQTGDFRTPAELALNKFEKESGHIRNQRGDYSHTFSRKDLQAELILLFEKQKEFGNPHVSGGLKEGIETLLMTQRPALSGDAVQK |
| | (mRNA B | MLGHCTFEPAEPKAAKNTYTAERFIWLTKLNNLRILEQGSERPLTDTERATLMDEPYRKSKLTYAQARKLLGLEDTAFFKGLRYGKDNAEA |
| | with | STLMEMKAYHAISRALEKEGLKDKKSPLNLSSELQDEIGTAFSLFKTDEDITGRLKDRVQPEILEALLKHISFDKFVQISLKALRRIVPLM |
| | HiBit | EQGKRYDEACAEIYGDHYGKKNTEEKIYLPPIPADEIRNPVVLRALSQARKVINGVVRRYGSPARIHIETAREVGKSFKDRKEIEKRQEEN |
| | tag)- | RKDREKAAAKFREYFPNFVGEPKSKDILKLRLYEQQHGKCLYSGKEINLVRLNEKGYVEIDHALPFSRTWDDSFNNKVLVLGSENQNKGNQ |
| | amino | TPYEYFNGKDNSREWQEFKARVETSRFPRSKKQRILLQKFDEDGFKECNLNDTRYVNRFLCQFVADHILLTGKGKRRVFASNGQITNLLRG |
| | acid | FWGLRKVRAENDRHHALDAVVVACSTVAMQQKITRFVRYKEMNAFDGKTIDKETGKVLHQKTHFPQPWEFFAQEVMIRVFGKPDGKPEFEE |
| | sequence | ADTPEKLRTLLAEKLSSRPEAVHEYVTPLFVSRAPNRKMSGAHKDTLRSAKRFVKHNEKISVKRVWLTEIKLADLENMVNYKNGREIELYE |
| | | ALKARLEAYGGNAKQAFDPKDNPFYKKGGQLVKAVRVEKTQESGVLLNKKNAYTIADNGDMVRVDVFCKVDKKGKNQYFIVPIYAWQVAEN |
| | | ILPDIDCKGYRIDDSYTFCFSLHKYDLIAFQKDEKSKVEFAYYINCDSSNGRFYLAWHDKGSKEQQFRISTQNLVLIQKYQVNELGKEIRP |
| | | CRLKKRPPVRGAPESATESGGTSTESEGSAGTSTESEGSAGSAGSTSGSSSGDKKYSIGLDIGTNSVGWAVITDEYKVPSKKFKVLGNTDR |
| | | HSIKKNLIGALLFDSGETAEATRLKRTARRRYTRRKNRICYLQEIFSNEMAKVDDSFFHRLEESFLVEEDKKHERHPIFGNIVDEVAYHEK |
| | | YPTIYHLRKKLVDSTDKADLRLIYLALAHMIKFRGHFLIEGDLNPDNSDVDKLFIQLVQTYNQLFEENPINASGVDAKAILSARLSKSRRL |
| | | ENLIAQLPGEKKNGLFGNLIALSLGLTPNFKSNFDLAEDAKLQLSKDTYDDDLDNLLAQIGDQYADLFLAAKNLSDAILLSDILRVNTEIT |
| | | KAPLSASMIKRYDEHHQDLTLLKALVRQQLPEKYKEIFFDQSKNGYAGYIDGGASQEEFYKFIKPILEKMDGTEELLVKLNREDLLRKQRT |
| | | FDNGSIPHQIHLGELHAILRRQEDFYPFLKDNREKIEKILTFRIPYYVGPLARGNSRFAWMTRKSEETITPWNFEEVVDKGASAQSFIERM |
| | | TNFDKNLPNEKVLPKHSLLYEYFTVYNELTKVKYVTEGMRKPAFLSGEQKKAIVDLLFKTNRKVTVKQLKEDYFKKIECFDSVEISGVEDR |
| | | FNASLGTYHDLLKIIKDKDFLDNEENEDILEDIVLTLTLFEDREMIEERLKTYAHLFDDKVMKQLKRRRYTGWGRLSRKLINGIRDKQSGK |
| | | TILDFLKSDGFANRNFMQLIHDDSLTFKEDIQKAQVSGQGDSLHEHIANLAGSPAIKKGILQTVKVVDELVKVMGRHKPENIVIEMARENQ |
| | | TTQKGQKNSRERMKRIEEGIKELGSQILKEHPVENTQLQNEKLYLYYLQNGRDMYVDQELDINRLSDYDVDHIVPQSFLKDDSIDNKVLTR |
| | | SDKNRGKSDNVPSEEVVKKMKNYWRQLLNAKLITQRKFDNLTKAERGGLSELDKAGFIKRQLVETRQITKHVAQILDSRMNTKYDENDKLI |
| | | REVKVITLKSKLVSDFRKDFQFYKVREINNYHHAHDAYLNAVVGTALIKKYPKLESEFVYGDYKVYDVRKMIAKSEQEIGKATAKYFFYSN |
| | | IMNFFKTEITLANGEIRKRPLIETNGETGEIVWDKGRDFATVRKVLSMPQVNIVKKTEVQTGGFSKESILPKRNSDKLIARKKDWDPKKYG |
| | | GFDSPTVAYSVLVVAKVEKGKSKKLKSVKELLGITIMERSSFEKNPIDFLEAKGYKEVKKDLIIKLPKYSLFELENGRKRMLASAGELQKG |
| | | NELALPSKYVNFLYLASHYEKLKGSPEDNEQKQLFVEQHKHYLDEIIEQISEFSKRVILADANLDKVLSAYNKHRDKPIREQAENIIHLFT |
| | | LTNLGAPAAFKYFDTTIDKKRYTSTKEVLDATLIHQSITGLYETRIDLSQLGGDGGGSPKKKRKVSESATPESVSGWRLFKKIS* |
| 11 | Cas9- | GGGAAGCUCAGAAUAAACGCUCAACUUUGGCCGGAUCUGCCACCAUGGCCGCCUUCAAGCCCAACCCCAUCAACUACAUCCUGGGCCUGGA |
| | Cas9 | CAUCGGCAUCGCCUCCGUGGGCUGGGCCAUGGUGGAGAUCGACGAGGAGGAGAACCCCAUCCGGCUGAUCGACCUGGGCGUGCGGGUGUUC |
| | fusion | GAGCGGGCCGAGGUGCCCAAGACCGGCGACUCCCUGGCCAUGGCCCGGCGGCUGGCCCGGUCCGUGCGGCGGCUGACCCGGCGGCGGGCCC |
| | (mRNA C)- | ACCGGCUGCUGCGGGCCCGGCGGCUGCUGAAGCGGGAGGGCGUGCUGCAGGCCGCCGACUUCGACGAGAACGGCCUGAUCAAGUCCCUGCC |
| | mRNA | CAACACCCCCUGGCAGCUGCGGGCCGCCGCCCUGGACCGGAAGCUGACCCCCCUGGAGUGGUCCGCCGUGCUGCUGCACCUGAUCAAGCAC |
| | sequence | CGGGGCUACCUGUCCCAGCGGAAGAACGAGGGCGAGACCGCCGACAAGGAGCUGGGCGCCCUGCUGAAGGGCGUGGCCAACAACGCCCACG |
| | | CCCUGCAGACCGGCGACUUCCGGACCCCCGCCGAGCUGGCCCUGAACAAGUUCGAGAAGGAGUCCGGCCACAUCCGGAACCAGCGGGGCGA |
| | | CUACUCCCACACCUUCUCCCGGAAGGACCUGCAGGCCGAGCUGAUCCUGCUGUUCGAGAAGCAGAAGGAGUUCGGCAACCCCCACGUGUCC |
| | | GGCGGCCUGAAGGAGGGCAUCGAGACCCUGCUGAUGACCCAGCGGCCCGCCCUGUCCGGCGACGCCGUGCAGAAGAUGCUGGGCCACUGCA |
| | | CCUUCGAGCCCGCCGAGCCCAAGGCCGCCAAGAACACCUACACCGCCGAGCGGUUCAUCUGGCUGACCAAGCUGAACAACCUGCGGAUCCU |
| | | GGAGCAGGGCUCCGAGCGGCCCCUGACCGACACCGAGCGGGCCACCCUGAUGGACGAGCCCUACCGGAAGUCCAAGCUGACCUACGCCCAG |
| | | GCCCGGAAGCUGCUGGGCCUGGAGGACACCGCCUUCUUCAAGGGCCUGCGGUACGGCAAGGACAACGCCGAGGCCUCCACCCUGAUGGAGA |
| | | UGAAGGCCUACCACGCCAUCUCCCGGGCCCUGGAGAAGGAGGGCCUGAAGGACAAGAAGUCCCCCCUGAACCUGUCCUCCGAGCUGCAGGA |
| | | CGAGAUCGGCACCGCCUUCUCCCUGUUCAAGACCGACGAGGACAUCACCGGCCGGCUGAAGGACCGGGUGCAGCCCGAGAUCCUGGAGGCC |
| | | CUGCUGAAGCACAUCUCCUUCGACAAGUUCGUGCAGAUCUCCCUGAAGGCCCUGCGGCGGAUCGUGCCCCUGAUGGAGCAGGGCAAGCGGU |
| | | ACGACGAGGCCUGCGCCGAGAUCUACGGCGACCACUACGGCAAGAAGAACACCGAGGAGAAGAUCUACCUGCCCCCCAUCCCCGCCGACGA |
| | | GAUCCGGAACCCCGUGGUGCUGCGGGCCCUGUCCCAGGCCCGGAAGGUGAUCAACGGCGUGGUGCGGCGGUACGGCUCCCCCGCCCGGAUC |
| | | CACAUCGAGACCGCCCGGGAGGUGGGCAAGUCCUUCAAGGACCGGAAGGAGAUCGAGAAGCGGCAGGAGGAGAACCGGAAGGACCGGGAGA |
| | | AGGCCGCCGCCAAGUUCCGGGAGUACUUCCCCAACUUCGUGGGCGAGCCCAAGUCCAAGGACAUCCUGAAGCUGCGGCUGUACGAGCAGCA |
| | | GCACGGCAAGUGCCUGUACUCCGGCAAGGAGAUCAACCUGGUGCGGCUGAACGAGAAGGGCUACGUGGAGAUCGACCACGCCCUGCCCUUC |
| | | UCCCGGACCUGGGACGACUCCUUCAACAACAAGGUGCUGGUGCUGGGCUCCGAGAACCAGAACAAGGGCAACCAGACCCCCUACGAGUACU |
| | | UCAACGGCAAGGACAACUCCCGGGAGUGGCAGGAGUUCAAGGCCCGGGUGGAGACCUCCCGGUUCCCCCGGUCCAAGAAGCAGCGGAUCCU |
| | | GCUGCAGAAGUUCGACGAGGACGGCUUCAAGGAGUGCAACCUGAACGACACCCGGUACGUGAACCGGUUCCUGUGCCAGUUCGUGGCCGAC |
| | | CACAUCCUGCUGACCGGCAAGGGCAAGCGGCGGGUGUUCGCCUCCAACGGCCAGAUCACCAACCUGCUGCGGGGCUUCUGGGGCCUGCGGA |
| | | AGGUGCGGGCCGAGAACGACCGGCACCACGCCCUGGACGCCGUGGUGGUGGCCUGCUCCACCGUGGCCAUGCAGCAGAAGAUCACCCGGUU |
| | | CGUGCGGUACAAGGAGAUGAACGCCUUCGACGGCAAGACCAUCGACAAGGAGACCGGCAAGGUGCUGCACCAGAAGACCCACUUCCCCCAG |
| | | CCCUGGGAGUUCUUCGCCCAGGAGGUGAUGAUCCGGGUGUUCGGCAAGCCCGACGGCAAGCCCGAGUUCGAGGAGGCCGACACCCCCGAGA |
| | | AGCUGCGGACCCUGCUGGCCGAGAAGCUGUCCUCCCGGCCCGAGGCCGUGCACGAGUACGUGACCCCCCUGUUCGUGUCCCGGGCCCCCAA |
| | | CCGGAAGAUGUCCGGCGCCCACAAGGACACCCUGCGGUCCGCCAAGCGGUUCGUGAAGCACAACGAGAAGAUCUCCGUGAAGCGGGUGUGG |
| | | CUGACCGAGAUCAAGCUGGCCGACCUGGAGAACAUGGUGAACUACAAGAACGGCCGGGAGAUCGAGCUGUACGAGGCCCUGAAGGCCCGGC |
| | | UGGAGGCCUACGGCGGCAACGCCAAGCAGGCCUUCGACCCCAAGGACAACCCCUUCUACAAGAAGGGCGGCCAGCUGGUGAAGGCCGUGCG |
| | | GGUGGAGAAGACCCAGGAGUCCGGCGUGCUGCUGAACAAGAAGAACGCCUACACCAUCGCCGACAACGGCGACAUGGUGCGGGUGGACGUG |
| | | UUCUGCAAGGUGGACAAGAAGGGCAAGAACCAGUACUUCAUCGUGCCCAUCUACGCCUGGCAGGUGGCCGAGAACAUCCUGCCCGACAUCG |
| | | ACUGCAAGGGCUACCGGAUCGACGACUCCUACACCUUCUGCUUCUCCCUGCACAAGUACGACCUGAUCGCCUUCCAGAAGGACGAGAAGUC |
| | | CAAGGUGGAGUUCGCCUACUACAUCAACUGCGACUCCUCCAACGGCCGGUUCUACCUGGCCUGGCACGACAAGGGCUCCAAGGAGCAGCAG |
| | | UUCCGGAUCUCCACCCAGAACCUGGUGCUGAUCCAGAAGUACCAGGUGAACGAGCUGGGCAAGGAGAUCCGGCCCUGCCGGCUGAAGAAGC |
| | | GGCCCCCCGUGCGGGGCGCCCCCGAGUCCGCCACCGAGUCCGGCGGCACCUCCACCGAGUCCGAGGGCUCCGCCGGCACCUCCACCGAGUC |
| | | CGAGGGCUCCGCCGGCUCCGCCGGCUCCACCUCCGGCUCCUCCUCCGGCGACAAGAAGUACUCCAUCGGCCUGGACAUCGGCACCAACUCC |
| | | GUGGGCUGGGCCGUGAUCACCGACGAGUACAAGGUGCCCUCCAAGAAGUUCAAGGUGCUGGGCAACACCGACCGGCACUCCAUCAAGAAGA |
| | | ACCUGAUCGGCGCCCUGCUGUUCGACUCCGGCGAGACCGCCGAGGCCACCCGGCUGAAGCGGACCGCCCGGCGGCGGUACACCCGGCGGAA |
| | | GAACCGGAUCUGCUACCUGCAGGAGAUCUUCUCCAACGAGAUGGCCAAGGUGGACGACUCCUUCUUCCACCGGCUGGAGGAGUCCUUCCUG |
| | | GUGGAGGAGGACAAGAAGCACGAGCGGCACCCCAUCUUCGGCAACAUCGUGGACGAGGUGGCCUACCACGAGAAGUACCCCACCAUCUACC |
| | | ACCUGCGGAAGAAGCUGGUGGACUCCACCGACAAGGCCGACCUGCGGCUGAUCUACCUGGCCCUGGCCCACAUGAUCAAGUUCCGGGGCCA |
| | | CUUCCUGAUCGAGGGCGACCUGAACCCCGACAACUCCGACGUGGACAAGCUGUUCAUCCAGCUGGUGCAGACCUACAACCAGCUGUUCGAG |
| | | GAGAACCCCAUCAACGCCUCCGGCGUGGACGCCAAGGCCAUCCUGUCCGCCCGGCUGUCCAAGUCCCGGCGGCUGGAGAACCUGAUCGCCC |
| | | AGCUGCCCGGCGAGAAGAAGAACGGCCUGUUCGGCAACCUGAUCGCCCUGUCCCUGGGCCUGACCCCCAACUUCAAGUCCAACUUCGACCU |
| | | GGCCGAGGACGCCAAGCUGCAGCUGUCCAAGGACACCUACGACGACGACCUGGACAACCUGCUGGCCCAGAUCGGCGACCAGUACGCCGAC |
| | | CUGUUCCUGGCCGCCAAGAACCUGUCCGACGCCAUCCUGCUGUCCGACAUCCUGCGGGUGAACACCGAGAUCACCAAGGCCCCCCUGUCCG |
| | | CCUCCAUGAUCAAGCGGUACGACGAGCACCACCAGGACCUGACCCUGCUGAAGGCCCUGGUGCGGCAGCAGCUGCCCGAGAAGUACAAGGA |
| | | GAUCUUCUUCGACCAGUCCAAGAACGGCUACGCCGGCUACAUCGACGGCGGCGCCUCCCAGGAGGAGUUCUACAAGUUCAUCAAGCCCAUC |
| | | CUGGAGAAGAUGGACGGCACCGAGGAGCUGCUGGUGAAGCUGAACCGGGAGGACCUGCUGCGGAAGCAGCGGACCUUCGACAACGGCUCCA |
| | | UCCCCCACCAGAUCCACCUGGGCGAGCUGCACGCCAUCCUGCGGCGGCAGGAGGACUUCUACCCCUUCCUGAAGGACAACCGGGAGAAGAU |
| | | CGAGAAGAUCCUGACCUUCCGGAUCCCCUACUACGUGGGCCCCCUGGCCCGGGGCAACUCCCGGUUCGCCUGGAUGACCCGGAAGUCCGAG |
| | | GAGACCAUCACCCCCUGGAACUUCGAGGAGGUGGUGGACAAGGGCGCCUCCGCCCAGUCCUUCAUCGAGCGGAUGACCAACUUCGACAAGA |
| | | ACCUGCCCAACGAGAAGGUGCUGCCCAAGCACUCCCUGCUGUACGAGUACUUCACCGUGUACAACGAGCUGACCAAGGUGAAGUACGUGAC |
| | | CGAGGGCAUGCGGAAGCCCGCCUUCCUGUCCGGCGAGCAGAAGAAGGCCAUCGUGGACCUGCUGUUCAAGACCAACCGGAAGGUGACCGUG |
| | | AAGCAGCUGAAGGAGGACUACUUCAAGAAGAUCGAGUGCUUCGACUCCGUGGAGAUCUCCGGCGUGGAGGACCGGUUCAACGCCUCCCUGG |
| | | GCACCUACCACGACCUGCUGAAGAUCAUCAAGGACAAGGACUUCCUGGACAACGAGGAGAACGAGGACAUCCUGGAGGACAUCGUGCUGAC |
| | | CCUGACCCUGUUCGAGGACCGGGAGAUGAUCGAGGAGCGGCUGAAGACCUACGCCCACCUGUUCGACGACAAGGUGAUGAAGCAGCUGAAG |
| | | CGGCGGCGGUACACCGGCUGGGGCCGGCUGUCCCGGAAGCUGAUCAACGGCAUCCGGGACAAGCAGUCCGGCAAGACCAUCCUGGACUUCC |
| | | UGAAGUCCGACGGCUUCGCCAACCGGAACUUCAUGCAGCUGAUCCACGACGACUCCCUGACCUUCAAGGAGGACAUCCAGAAGGCCCAGGU |
| | | GUCCGGCCAGGGCGACUCCCUGCACGAGCACAUCGCCAACCUGGCCGGCUCCCCCGCCAUCAAGAAGGGCAUCCUGCAGACCGUGAAGGUG |
| | | GUGGACGAGCUGGUGAAGGUGAUGGGCCGGCACAAGCCCGAGAACAUCGUGAUCGAGAUGGCCCGGGAGAACCAGACCACCCAGAAGGGCC |
| | | AGAAGAACUCCCGGGAGCGGAUGAAGCGGAUCGAGGAGGGCAUCAAGGAGCUGGGCUCCCAGAUCCUGAAGGAGCACCCCGUGGAGAACAC |
| | | CCAGCUGCAGAACGAGAAGCUGUACCUGUACUACCUGCAGAACGGCCGGGACAUGUACGUGGACCAGGAGCUGGACAUCAACCGGCUGUCC |
| | | GACUACGACGUGGACCACAUCGUGCCCCAGUCCUUCCUGAAGGACGACUCCAUCGACAACAAGGUGCUGACCCGGUCCGACAAGAACCGGG |
| | | GCAAGUCCGACAACGUGCCCUCCGAGGAGGUGGUGAAGAAGAUGAAGAACUACUGGCGGCAGCUGCUGAACGCCAAGCUGAUCACCCAGCG |
| | | GAAGUUCGACAACCUGACCAAGGCCGAGCGGGGCGGCCUGUCCGAGCUGGACAAGGCCGGCUUCAUCAAGCGGCAGCUGGUGGAGACCCGG |
| | | CAGAUCACCAAGCACGUGGCCCAGAUCCUGGACUCCCGGAUGAACACCAAGUACGACGAGAACGACAAGCUGAUCCGGGAGGUGAAGGUGA |
| | | UCACCCUGAAGUCCAAGCUGGUGUCCGACUUCCGGAAGGACUUCCAGUUCUACAAGGUGCGGGAGAUCAACAACUACCACCACGCCCACGA |
| | | CGCCUACCUGAACGCCGUGGUGGGCACCGCCCUGAUCAAGAAGUACCCCAAGCUGGAGUCCGAGUUCGUGUACGGCGACUACAAGGUGUAC |
| | | GACGUGCGGAAGAUGAUCGCCAAGUCCGAGCAGGAGAUCGGCAAGGCCACCGCCAAGUACUUCUUCUACUCCAACAUCAUGAACUUCUUCA |
| | | AGACCGAGAUCACCCUGGCCAACGGCGAGAUCCGGAAGCGGCCCCUGAUCGAGACCAACGGCGAGACCGGCGAGAUCGUGUGGGACAAGGG |
| | | CCGGGACUUCGCCACCGUGCGGAAGGUGCUGUCCAUGCCCCAGGUGAACAUCGUGAAGAAGACCGAGGUGCAGACCGGCGGCUUCUCCAAG |
| | | GAGUCCAUCCUGCCCAAGCGGAACUCCGACAAGCUGAUCGCCCGGAAGAAGGACUGGGACCCCAAGAAGUACGGCGGCUUCGACUCCCCCA |
| | | CCGUGGCCUACUCCGUGCUGGUGGUGGCCAAGGUGGAGAAGGGCAAGUCCAAGAAGCUGAAGUCCGUGAAGGAGCUGCUGGGCAUCACCAU |
| | | CAUGGAGCGGUCCUCCUUCGAGAAGAACCCCAUCGACUUCCUGGAGGCCAAGGGCUACAAGGAGGUGAAGAAGGACCUGAUCAUCAAGCUG |
| | | CCCAAGUACUCCCUGUUCGAGCUGGAGAACGGCCGGAAGCGGAUGCUGGCCUCCGCCGGCGAGCUGCAGAAGGGCAACGAGCUGGCCCUGC |
| | | CCUCCAAGUACGUGAACUUCCUGUACCUGGCCUCCCACUACGAGAAGCUGAAGGGCUCCCCCGAGGACAACGAGCAGAAGCAGCUGUUCGU |
| | | GGAGCAGCACAAGCACUACCUGGACGAGAUCAUCGAGCAGAUCUCCGAGUUCUCCAAGCGGGUGAUCCUGGCCGACGCCAACCUGGACAAG |
| | | GUGCUGUCCGCCUACAACAAGCACCGGGACAAGCCCAUCCGGGAGCAGGCCGAGAACAUCAUCCACCUGUUCACCCUGACCAACCUGGGCG |
| | | CCCCCGCCGCCUUCAAGUACUUCGACACCACCAUCGACAAGAAGCGGUACACCUCCACCAAGGAGGUGCUGGACGCCACCCUGAUCCACCA |
| | | GUCCAUCACCGGCCUGUACGAGACCCGGAUCGACCUGUCCCAGCUGGGGGGCGACGGCGGCGGCUCCCCCAAGAAGAAGCGGAAGGUGUCC |
| | | GAGUCCGCCACCCCCGAGUCCGUGUCCGGCUGGCGGCUGUUCAAGAAGAUCUCCUAGCUAGCACCAGCCUCAAGAACACCCGAAUGGAGUC |
| | | UCUAAGCUACAUAAUACCAACUUACACUUUACAAAAUGUUGUCCCCCAAAAUGUAGCCAUUCGUAUCUGCUCCUAAUAAAAAGAAAGUUUC |
| | | UUCACAUUCUCUCGAGAAAAAAAAAAAAUGGAAAAAAAAAAAACGGAAAAAAAAAAAAGGUAAAAAAAAAAAAUAUAAAAAAAAAAAACAU |
| | | AAAAAAAAAAAACGAAAAAAAAAAAACGUAAAAAAAAAAAACUCAAAAAAAAAAAGAUAAAAAAAAAAAACCUAAAAAAAAAAAAUGUAAA |
| | | AAAAAAAAAGGGAAAAAAAAAAAACGCAAAAAAAAAAAACACAAAAAAAAAAAAUGCAAAAAAAAAAAAUCGAAAAAAAAAAAAUCUAAAA |
| | | AAAAAAAACGAAAAAAAAAAAACCCAAAAAAAAAAAAGACAAAAAAAAAAAAUAGAAAAAAAAAAAGUUAAAAAAAAAAAACUGAAAAAAA |
| | | AAAAAUUUAAAAAAAAAAAAUCUAG |
| 12 | Cas9- | auggccgccuucaagcccaaccccaucaacuacauccugggccuggacaucggcaucgccuccgugggcugggccaugguggagaucgacg |
| | Cas9 | aggaggagaaccccauccggcugaucgaccugggcgugcggguguucgagcgggccgaggugcccaagaccggcgacucccuggccauggc |
| | fusion | ccggcggcuggcccgguccgugcggcggcugacccggcggcgggcccaccggcugcugcgggcccggcggcugcugaaggggagcggcgug |
| | (mRNA C)- | cugcaggccgccgacuucgacgagaacggccugaucaagucccugcccaacacccccuggcagcugcgggccgccgcccuggaccggaagc |
| | ORF | ugaccccccuggagugguccgccgugcugcugcaccugaucaagcaccggggcuaccugucccagcggaagaacgagggcgagaccgccga |
| | sequence | caaggagcugggcgcccugcugaagggcguggccaacaacgcccacgcccugcagaccggcgacuuccggacccccgccgagcuggcccug |
| | | aacaaguucgagaaggaguccggccacauccggaaccagcggcgggacuacucccacaccuucucccggaaggaccugcaggccgagcuga |
| | | uccugcuguucgagaagcagaaggaguucggcaacccccacguguccggcggccugaaggagggcaucgagacccugcugaugacccagcg |
| | | gcccgcccuguccggcgacgccgugcagaagaugcugggccacugcaccuucgagcccgccgagcccaaggccgccaagaacaccuacacc |
| | | gccgagcgguucaucuggcugaccaagcugaacaaccugcggauccuggagcagggcuccgagcggccccugaccgacaccgagcgggcca |
| | | cccugauggacgagcccuaccggaaguccaagcugaccuacgcccaggcccggaagcugcugggccuggaggacaccgccuucuucaaggg |
| | | ccugcgguacggcaaggacaacgccgaggccuccacccugauggagaugaaggccuaccacgccaucucccgggcccuggagaaggagggc |
| | | cugaaggacaagaaguccccccugaaccuguccuccgagcugcaggacgagaucggcaccgccuucucccuguucaagaccgacgaggaca |
| | | ucaccggccggcugaaggaccgggugcagcccgagauccuggaggcccugcugaagcacaucuccuucgacaaguucgugcagaucucccu |
| | | gaaggcccugcggcggaucgugccccugauggagcagggcaagcgguacgacgaggccugcgccgagaucuacggcgaccacuacggcaag |
| | | aagaacaccgaggagaagaucuaccugccccccauccccgccgacgagauccggaaccccguggugcugcgggcccugucccaggcccgga |
| | | aggugaucaacggcguggugcggcgguacggcucccccgcccggauccacaucgagaccgcccgggaggugggcaaguccuucaaggaccg |
| | | gaaggagaucgagaagcggcaggaggagaaccggaaggaccgggagaaggccgccgccaaguuccgggaguacuuccccaacuucgugggc |
| | | gagcccaaguccaaggacauccugaagcugcggcuguacgagcagcagcacggcaagugccuguacuccggcaaggagaucaaccuggugc |
| | | ggcugaacgagaagggcuacguggagaucgaccacgcccugcccuucucccggaccugggacgacuccuucaacaacaaggugcuggugcu |
| | | gggcuccgagaaccagaacaagggcaaccagacccccuacgaguacuucaacggcaaggacaacucccgggaguggcaggaguucaaggcc |
| | | cggguggagaccucccgguucccccgguccaagaagcagcggauccugcugcagaaguucgacgaggacggcuucaaggagugcaaccuga |
| | | acgacacccgguacgugaaccgguuccugugccaguucguggccgaccacauccugcugaccggcaagggcaagggcggcguguucgccuc |
| | | caacggccagaucaccaaccugcugcggggcuucuggggccugcggaagguggggcccgagaacgaccggcaccacgcccuggacgccgug |
| | | gugguggccugcuccaccguggccaugcagcagaagaucacccgguucgugcgguacaaggagaugaacgccuucgacggcaagaccaucg |
| | | acaaggagaccggcaaggugcugcaccagaagacccacuucccccagcccuggcgaguuuucgcccaggaggugaugauccggguguucgg |
| | | caagcccgacggcaagcccgaguucgaggaggccgacacccccgagaagcugcggacccugcuggccgagaagcuguccucccggcccgag |
| | | gccgugcacgaguacgugaccccccuguucgugucccgggcccccaaccggaagauguccggcgcccacaaggacacccugcgguccgcca |
| | | agcgguucgugaagcacaacgagaagaucuccgugaagcggguguggcugaccgagaucaagcuggccgaccuggagaacauggugaacua |
| | | caagaacggccgggagaucgagcuguacgaggcccugaaggcccggcuggaggccuacggcggcaacgccaagcaggccuucgaccccaag |
| | | gacaaccccuucuacaagaagggcggccagcuggugaaggccgugcggguggagaagacccaggaguccggcgugcugcugaacaagaaga |
| | | acgccuacaccaucgccgacaacggcgacauggugcggguggacguguucugcaagguggacaagaagggcaagaaccaguacuucaucgu |
| | | gcccaucuacgccuggcagguggccgagaacauccugcccgacaucgacugcaagggcuaccggaucgacgacuccuacaccuucugcuuc |
| | | ucccugcacaaguacgaccugaucgccuuccagaaggacgagaaguccaagguggaguucgccuacuacaucaacugcgacuccuccaacg |
| | | gccgguucuaccuggccuggcacgacaagggcuccaaggagcagcaguuccggaucuccacccagaaccuggugcugauccagaaguacca |
| | | ggugaacgagcugggcaaggagauccggcccugccggcugaagaagcggccccccgugcggGGCGCCCCCGAGUCCGCCACCGAGUCCGGC |
| | | GGCACCUCCACCGAGUCCGAGGGCUCCGCCGGCACCUCCACCGAGUCCGAGGGCUCCGCCGGCUCCGCCGGCUCCACCUCCGGCUCCUCCU |
| | | CCGGCGACAAGAAGUACUCCAUCGGCCUGGACAUCGGCACCAACUCCGUGGGCUGGGCCGUGAUCACCGACGAGUACAAGGUGCCCUCCAA |
| | | GAAGUUCAAGGUGCUGGGCAACACCGACCGGCACUCCAUCAAGAAGAACCUGAUCGGCGCCCUGCUGUUCGACUCCGGCGAGACCGCCGAG |
| | | GCCACCCGGCUGAAGCGGACCGCCCGGCGGCGGUACACCCGGCGGAAGAACCGGAUCUGCUACCUGCAGGAGAUCUUCUCCAACGAGAUGG |
| | | CCAAGGUGGACGACUCCUUCUUCCACCGGCUGGAGGAGUCCUUCCUGGUGGAGGAGGACAAGAAGCACGAGCGGCACCCCAUCUUCGGCAA |
| | | CAUCGUGGACGAGGUGGCCUACCACGAGAAGUACCCCACCAUCUACCACCUGCGGAAGAAGCUGGUGGACUCCACCGACAAGGCCGACCUG |
| | | CGGCUGAUCUACCUGGCCCUGGCCCACAUGAUCAAGUUCCGGGGCCACUUCCUGAUCGAGGGCGACCUGAACCCCGACAACUCCGACGUGG |
| | | ACAAGCUGUUCAUCCAGCUGGUGCAGACCUACAACCAGCUGUUCGAGGAGAACCCCAUCAACGCCUCCGGCGUGGACGCCAAGGCCAUCCU |
| | | GUCCGCCCGGCUGUCCAAGUCCCGGCGGCUGGAGAACCUGAUCGCCCAGCUGCCCGGCGAGAAGAAGAACGGCCUGUUCGGCAACCUGAUC |
| | | GCCCUGUCCCUGGGCCUGACCCCCAACUUCAAGUCCAACUUCGACCUGGCCGAGGACGCCAAGCUGCAGCUGUCCAAGGACACCUACGACG |
| | | ACGACCUGGACAACCUGCUGGCCCAGAUCGGCGACCAGUACGCCGACCUGUUCCUGGCCGCCAAGAACCUGUCCGACGCCAUCCUGCUGUC |
| | | CGACAUCCUGCGGGUGAACACCGAGAUCACCAAGGCCCCCCUGUCCGCCUCCAUGAUCAAGCGGUACGACGAGCACCACCAGGACCUGACC |
| | | CUGCUGAAGGCCCUGGUGCGGCAGCAGCUGCCCGAGAAGUACAAGGAGAUCUUCUUCGACCAGUCCAAGAACGGCUACGCCGGCUACAUCG |
| | | ACGGCGGCGCCUCCCAGGAGGAGUUCUACAAGUUCAUCAAGCCCAUCCUGGAGAAGAUGGACGGCACCGAGGAGCUGCUGGUGAAGCUGAA |
| | | CCGGGAGGACCUGCUGCGGAAGCAGCGGACCUUCGACAACGGCUCCAUCCCCCACCAGAUCCACCUGGGCGAGCUGCACGCCAUCCUGCGG |
| | | CGGCAGGAGGACUUCUACCCCUUCCUGAAGGACAACCGGGAGAAGAUCGAGAAGAUCCUGACCUUCCGGAUCCCCUACUACGUGGGCCCCC |
| | | UGGCCCGGGGCAACUCCCGGUUCGCCUGGAUGACCCGGAAGUCCGAGGAGACCAUCACCCCCUGGAACUUCGAGGAGGUGGUGGACAAGGG |
| | | CGCCUCCGCCCAGUCCUUCAUCGAGCGGAUGACCAACUUCGACAAGAACCUGCCCAACGAGAAGGUGCUGCCCAAGCACUCCCUGCUGUAC |
| | | GAGUACUUCACCGUGUACAACGAGCUGACCAAGgugaaguacgugaccgagggcaugcggaagcccgccuuccuguccggcgagcagaaga |
| | | aggccaucguggaccugcuguucaagaccaaccggaaggugaccgugaagcagcugaaggaggacuacuucaagaagaucgagugcuucga |
| | | cuccguggagaucuccggcguggaggaccgguucaacgccucccugggcaccuaccacgaccugcugaagaucaucaaggacaaggacuuc |
| | | cuggacaacgaggagaacgaggacauccuggaggacaucgugcugacccugacccuguucgaggaccgggagaugaucgaggagcggcuga |
| | | agaccuacgcccaccuguucgacgacaaggugaugaagcagcugaagcggcggcgguacaccggcuggggccggcugucccggaagcugau |
| | | caacggcauccgggacaagcaguccggcaagaccauccuggacuuccugaaguccgacggcuucgccaaccggaacuucaugcagcugauc |
| | | cacgacgacucccugaccuucaaggaggacauccagaaggcccagguguccggccagggcgacucccugcacgagcacaucgccaaccugg |
| | | ccggcucccccgccaucaagaagggcauccugcagaccgugaaggugguggacgagcuggugaaggugaugggccggcacaagcccgagaa |
| | | caucgugaucgagauggcccgggagaaccagaccacccagaagggccagaagaacucccgggagcggaugaagcggaucgaggagggcauc |
| | | aaggagcugggcucccagauccugaaggagcaccccguggagaacacccagcugcagaacgagaagcuguaccuguacuaccugcagaacg |
| | | gccgggacauguacguggaccaggagcuggacaucaaccggcuguccgacuacgacguggaccacaucgugccccaguccuuccugaagga |
| | | cgacuccaucgacaacaaggugcugacccgguccgacaagaaccggggcaaguccgacaacgugcccuccgaggagguggugaagaagaug |
| | | aagaacuacuggcggcagcugcugaacgccaagcugaucacccagcggaaguucgacaaccugaccaaggccgagcggggggccuguccg |
| | | agcuggacaaggccggcuucaucaagcggcagcugguggagacccggcagaucaccaagcacguggcccagauccuggacucccggaugaa |
| | | caccaaguacgacgagaacgacaagcugauccgggaggugaaggugaucacccugaaguccaagcugguguccgacuuccggaaggacuuc |
| | | caguucuacaaggugcgggagaucaacaacuaccaccacgcccacgacgccuaccugaacgccguggugggcaccgcccugaucaagaagu |
| | | accccaagcuggaguccgaguucguguacggcgacuacaagguguacgacgugcggaagaugaucgccaaguccgagcaggagaucggcaa |
| | | ggccaccgccaaguacuucuucuacuccaacaucaugaacuucuucaagaccgagaucacccuggccaacggcgagauccggaagcggccc |
| | | cugaucgagaccaacggcgagaccggcgagaucgugugggacaagggccgggacuucgccaccgugcggaaggugcuguccaugccccagg |
| | | ugaacaucgugaagaagaccgaggugcagaccggcggcuucuccaaggaguccauccugcccaagcggaacuccgacaagcugaucgcccg |
| | | gaagaaggacugggaccccaagaaguacggcggcuucgacucccccaccguggccuacuccgugcuggugguggccaagguggagaagggc |
| | | aaguccaagaagcugaaguccgugaaggagcugcugggcaucaccaucauggagcgguccuccuucgagaagaaccccaucgacuuccugg |
| | | aggccaagggcuacaaggaggugaagaaggaccugaucaucaagcugcccaaguacucccuguucgagcuggagaacggccggaagcggau |
| | | gcuggccuccgccggcgagcugcagaagggcaacgagcuggcccugcccuccaaguacgugaacuuccuguaccuggccucccacuacgag |
| | | aagcugaagggcucccccgaggacaacgagcagaagcagcuguucguggagcagcacaagcacuaccuggacgagaucaucgagcagaucu |
| | | ccgaguucuccaagcgggugauccuggccgacgccaaccuggacaaggugcuguccgccuacaacaagcaccgggacaagcccauccggga |
| | | gcaggccgagaacaucauccaccuguucacccugaccaaccugggcgcccccgccgccuucaaguacuucgacaccaccaucgacAAGaag |
| | | cgguacaccuccaccaaggaggugcuggacgccacccugauccaccaguccaucaccggccuguacgagacccggaucgaccugucccagc |
| | | ugggcggcgacGGCGGCGGCUCCCCCAAGAAGAAGCGGAAGGUGUCCGAGUCCGCCACCCCCGAGUCCGUGUCCGGCUGGCGGCUGUUCAA |
| | | GAAGAUCUCCuag |
| 13 | Cas9- | MAAFKPNPINYILGLDIGIASVGWAMVEIDEEENPIRLIDLGVRVFERAEVPKTGDSLAMARRLARSVRRLTRRRAHRLLRARRLLKREGV |
| | Cas9 | LQAADFDENGLIKSLPNTPWQLRAAALDRKLTPLEWSAVLLHLIKHRGYLSQRKNEGETADKELGALLKGVANNAHALQTGDFRTPAELAL |
| | fusion | NKFEKESGHIRNQRGDYSHTFSRKDLQAELILLFEKQKEFGNPHVSGGLKEGIETLLMTQRPALSGDAVQKMLGHCTFEPAEPKAAKNTYT |
| | (mRNA C)- | AERFIWLTKLNNLRILEQGSERPLTDTERATLMDEPYRKSKLTYAQARKLLGLEDTAFFKGLRYGKDNAEASTLMEMKAYHAISRALEKEG |
| | amino | LKDKKSPLNLSSELQDEIGTAFSLFKTDEDITGRLKDRVQPEILEALLKHISFDKFVQISLKALRRIVPLMEQGKRYDEACAEIYGDHYGK |
| | acid | KNTEEKIYLPPIPADEIRNPVVLRALSQARKVINGVVRRYGSPARIHIETAREVGKSFKDRKEIEKRQEENRKDREKAAAKFREYFPNFVG |
| | sequence | EPKSKDILKLRLYEQQHGKCLYSGKEINLVRLNEKGYVEIDHALPFSRTWDDSFNNKVLVLGSENQNKGNQTPYEYFNGKDNSREWQEFKA |
| | | RVETSRFPRSKKQRILLQKFDEDGFKECNLNDTRYVNRFLCQFVADHILLTGKGKRRVFASNGQITNLLRGFWGLRKVRAENDRHHALDAV |
| | | VVACSTVAMQQKITRFVRYKEMNAFDGKTIDKETGKVLHQKTHFPQPWEFFAQEVMIRVFGKPDGKPEFEEADTPEKLRTLLAEKLSSRPE |
| | | AVHEYVTPLFVSRAPNRKMSGAHKDTLRSAKRFVKHNEKISVKRVWLTEIKLADLENMVNYKNGREIELYEALKARLEAYGGNAKQAFDPK |
| | | DNPFYKKGGQLVKAVRVEKTQESGVLLNKKNAYTIADNGDMVRVDVFCKVDKKGKNQYFIVPIYAWQVAENILPDIDCKGYRIDDSYTFCF |
| | | SLHKYDLIAFQKDEKSKVEFAYYINCDSSNGRFYLAWHDKGSKEQQFRISTQNLVLIQKYQVNELGKEIRPCRLKKRPPVRGAPESATESG |
| | | GTSTESEGSAGTSTESEGSAGSAGSTSGSSSGDKKYSIGLDIGTNSVGWAVITDEYKVPSKKFKVLGNTDRHSIKKNLIGALLFDSGETAE |
| | | ATRLKRTARRRYTRRKNRICYLQEIFSNEMAKVDDSFFHRLEESFLVEEDKKHERHPIFGNIVDEVAYHEKYPTIYHLRKKLVDSTDKADL |
| | | RLIYLALAHMIKFRGHFLIEGDLNPDNSDVDKLFIQLVQTYNQLFEENPINASGVDAKAILSARLSKSRRLENLIAQLPGEKKNGLFGNLI |
| | | ALSLGLTPNFKSNFDLAEDAKLQLSKDTYDDDLDNLLAQIGDQYADLFLAAKNLSDAILLSDILRVNTEITKAPLSASMIKRYDEHHQDLT |
| | | LLKALVRQQLPEKYKEIFFDQSKNGYAGYIDGGASQEEFYKFIKPILEKMDGTEELLVKLNREDLLRKQRTFDNGSIPHQIHLGELHAILR |
| | | RQEDFYPFLKDNREKIEKILTFRIPYYVGPLARGNSRFAWMTRKSEETITPWNFEEVVDKGASAQSFIERMTNFDKNLPNEKVLPKHSLLY |
| | | EYFTVYNELTKVKYVTEGMRKPAFLSGEQKKAIVDLLFKTNRKVTVKQLKEDYFKKIECFDSVEISGVEDRFNASLGTYHDLLKIIKDKDF |
| | | LDNEENEDILEDIVLTLTLFEDREMIEERLKTYAHLFDDKVMKQLKRRRYTGWGRLSRKLINGIRDKQSGKTILDFLKSDGFANRNFMQLI |
| | | HDDSLTFKEDIQKAQVSGQGDSLHEHIANLAGSPAIKKGILQTVKVVDELVKVMGRHKPENIVIEMARENQTTQKGQKNSRERMKRIEEGI |
| | | KELGSQILKEHPVENTQLQNEKLYLYYLQNGRDMYVDQELDINRLSDYDVDHIVPQSFLKDDSIDNKVLTRSDKNRGKSDNVPSEEVVKKM |
| | | KNYWRQLLNAKLITQRKFDNLTKAERGGLSELDKAGFIKRQLVETRQITKHVAQILDSRMNTKYDENDKLIREVKVITLKSKLVSDFRKDF |
| | | QFYKVREINNYHHAHDAYLNAVVGTALIKKYPKLESEFVYGDYKVYDVRKMIAKSEQEIGKATAKYFFYSNIMNFFKTEITLANGEIRKRP |
| | | LIETNGETGEIVWDKGRDFATVRKVLSMPQVNIVKKTEVQTGGFSKESILPKRNSDKLIARKKDWDPKKYGGFDSPTVAYSVLVVAKVEKG |
| | | KSKKLKSVKELLGITIMERSSFEKNPIDFLEAKGYKEVKKDLIIKLPKYSLFELENGRKRMLASAGELQKGNELALPSKYVNFLYLASHYE |
| | | KLKGSPEDNEQKQLFVEQHKHYLDEIIEQISEFSKRVILADANLDKVLSAYNKHRDKPIREQAENIIHLFTLTNLGAPAAFKYFDTTIDKK |
| | | RYTSTKEVLDATLIHQSITGLYETRIDLSQLGGDGGGSPKKKRKVSESATPESVSGWRLFKKIS* |
| 14 | Cas9- | GGGAAGCUCAGAAUAAACGCUCAACUUUGGCCGGAUCUGCCACCAUGGACGGCUCCGGCGGCGGCUCCCCCAAGAAGAAGCGGAAGGUGGA |
| | Cas9 | GGACAAGCGGCCCGCCGCCACCAAGAAGGCCGGCCAGGCCAAGAAGAAGAAGGGCGGCUCCGGCGGCGGCGCCGCCUUCAAGCCCAACCCC |
| | fusion | AUCAACUACAUCCUGGGCCUGGACAUCGGCAUCGCCUCCGUGGGCUGGGCCAUGGUGGAGAUCGACGAGGAGGAGAACCCCAUCCGGCUGA |
| | (mRNA D)- | UCGACCUGGGCGUGCGGGUGUUCGAGCGGGCCGAGGUGCCCAAGACCGGCGACUCCCUGGCCAUGGCCCGGCGGCUGGCCCGGUCCGUGCG |
| | mRNA | GCGGCUGACCCGGCGGCGGGCCCACCGGCUGCUGCGGGCCCGGCGGCUGCUGAAGCGGGAGGGCGUGCUGCAGGCCGCCGACUUCGACGAG |
| | sequence | AACGGCCUGAUCAAGUCCCUGCCCAACACCCCCUGGCAGCUGCGGGCCGCCGCCCUGGACCGGAAGCUGACCCCCCUGGAGUGGUCCGCCG |
| | | UGCUGCUGCACCUGAUCAAGCACCGGGGCUACCUGUCCCAGCGGAAGAACGAGGGCGAGACCGCCGACAAGGAGCUGGGCGCCCUGCUGAA |
| | | GGGCGUGGCCAACAACGCCCACGCCCUGCAGACCGGCGACUUCCGGACCCCCGCCGAGCUGGCCCUGAACAAGUUCGAGAAGGAGUCCGGC |
| | | CACAUCCGGAACCAGCGGGGCGACUACUCCCACACCUUCUCCCGGAAGGACCUGCAGGCCGAGCUGAUCCUGCUGUUCGAGAAGCAGAAGG |
| | | AGUUCGGCAACCCCCACGUGUCCGGCGGCCUGAAGGAGGGCAUCGAGACCCUGCUGAUGACCCAGCGGCCCGCCCUGUCCGGCGACGCCGU |
| | | GCAGAAGAUGCUGGGCCACUGCACCUUCGAGCCCGCCGAGCCCAAGGCCGCCAAGAACACCUACACCGCCGAGCGGUUCAUCUGGCUGACC |
| | | AAGCUGAACAACCUGCGGAUCCUGGAGCAGGGCUCCGAGCGGCCCCUGACCGACACCGAGCGGGCCACCCUGAUGGACGAGCCCUACCGGA |
| | | AGUCCAAGCUGACCUACGCCCAGGCCCGGAAGCUGCUGGGCCUGGAGGACACCGCCUUCUUCAAGGGCCUGCGGUACGGCAAGGACAACGC |
| | | CGAGGCCUCCACCCUGAUGGAGAUGAAGGCCUACCACGCCAUCUCCCGGGCCCUGGAGAAGGAGGGCCUGAAGGACAAGAAGUCCCCCCUG |
| | | AACCUGUCCUCCGAGCUGCAGGACGAGAUCGGCACCGCCUUCUCCCUGUUCAAGACCGACGAGGACAUCACCGGCCGGCUGAAGGACCGGG |
| | | UGCAGCCCGAGAUCCUGGAGGCCCUGCUGAAGCACAUCUCCUUCGACAAGUUCGUGCAGAUCUCCCUGAAGGCCCUGCGGCGGAUCGUGCC |
| | | CCUGAUGGAGCAGGGCAAGCGGUACGACGAGGCCUGCGCCGAGAUCUACGGCGACCACUACGGCAAGAAGAACACCGAGGAGAAGAUCUAC |
| | | CUGCCCCCCAUCCCCGCCGACGAGAUCCGGAACCCCGUGGUGCUGCGGGCCCUGUCCCAGGCCCGGAAGGUGAUCAACGGCGUGGUGCGGC |
| | | GGUACGGCUCCCCCGCCCGGAUCCACAUCGAGACCGCCCGGGAGGUGGGCAAGUCCUUCAAGGACCGGAAGGAGAUCGAGAAGCGGCAGGA |
| | | GGAGAACCGGAAGGACCGGGAGAAGGCCGCCGCCAAGUUCCGGGAGUACUUCCCCAACUUCGUGGGCGAGCCCAAGUCCAAGGACAUCCUG |
| | | AAGCUGCGGCUGUACGAGCAGCAGCACGGCAAGUGCCUGUACUCCGGCAAGGAGAUCAACCUGGUGCGGCUGAACGAGAAGGGCUACGUGG |
| | | AGAUCGACCACGCCCUGCCCUUCUCCCGGACCUGGGACGACUCCUUCAACAACAAGGUGCUGGUGCUGGGCUCCGAGAACCAGAACAAGGG |
| | | CAACCAGACCCCCUACGAGUACUUCAACGGCAAGGACAACUCCCGGGAGUGGCAGGAGUUCAAGGCCCGGGUGGAGACCUCCCGGUUCCCC |
| | | CGGUCCAAGAAGCAGCGGAUCCUGCUGCAGAAGUUCGACGAGGACGGCUUCAAGGAGUGCAACCUGAACGACACCCGGUACGUGAACCGGU |
| | | UCCUGUGCCAGUUCGUGGCCGACCACAUCCUGCUGACCGGCAAGGGCAAGCGGCGGGUGUUCGCCUCCAACGGCCAGAUCACCAACCUGCU |
| | | GCGGGGCUUCUGGGGCCUGCGGAAGGUGCGGGCCGAGAACGACCGGCACCACGCCCUGGACGCCGUGGUGGUGGCCUGCUCCACCGUGGCC |
| | | AUGCAGCAGAAGAUCACCCGGUUCGUGCGGUACAAGGAGAUGAACGCCUUCGACGGCAAGACCAUCGACAAGGAGACCGGCAAGGUGCUGC |
| | | ACCAGAAGACCCACUUCCCCCAGCCCUGGGAGUUCUUCGCCCAGGAGGUGAUGAUCCGGGUGUUCGGCAAGCCCGACGGCAAGCCCGAGUU |
| | | CGAGGAGGCCGACACCCCCGAGAAGCUGCGGACCCUGCUGGCCGAGAAGCUGUCCUCCCGGCCCGAGGCCGUGCACGAGUACGUGACCCCC |
| | | CUGUUCGUGUCCCGGGCCCCCAACCGGAAGAUGUCCGGCGCCCACAAGGACACCCUGCGGUCCGCCAAGCGGUUCGUGAAGCACAACGAGA |
| | | AGAUCUCCGUGAAGCGGGUGUGGCUGACCGAGAUCAAGCUGGCCGACCUGGAGAACAUGGUGAACUACAAGAACGGCCGGGAGAUCGAGCU |
| | | GUACGAGGCCCUGAAGGCCCGGCUGGAGGCCUACGGCGGCAACGCCAAGCAGGCCUUCGACCCCAAGGACAACCCCUUCUACAAGAAGGGC |
| | | GGCCAGCUGGUGAAGGCCGUGCGGGUGGAGAAGACCCAGGAGUCCGGCGUGCUGCUGAACAAGAAGAACGCCUACACCAUCGCCGACAACG |
| | | GCGACAUGGUGCGGGUGGACGUGUUCUGCAAGGUGGACAAGAAGGGCAAGAACCAGUACUUCAUCGUGCCCAUCUACGCCUGGCAGGUGGC |
| | | CGAGAACAUCCUGCCCGACAUCGACUGCAAGGGCUACCGGAUCGACGACUCCUACACCUUCUGCUUCUCCCUGCACAAGUACGACCUGAUC |
| | | GCCUUCCAGAAGGACGAGAAGUCCAAGGUGGAGUUCGCCUACUACAUCAACUGCGACUCCUCCAACGGCCGGUUCUACCUGGCCUGGCACG |
| | | ACAAGGGCUCCAAGGAGCAGCAGUUCCGGAUCUCCACCCAGAACCUGGUGCUGAUCCAGAAGUACCAGGUGAACGAGCUGGGCAAGGAGAU |
| | | CCGGCCCUGCCGGCUGAAGAAGCGGCCCCCCGUGCGGUAGCUAGCACCAGCCUCAAGAACACCCGAAUGGAGUCUCUAAGCUACAUAAUAC |
| | | CAACUUACACUUUACAAAAUGUUGUCCCCCAAAAUGUAGCCAUUCGUAUCUGCUCCUAAUAAAAAGAAAGUUUCUUCACAUUCUCUCGAGA |
| | | AAAAAAAAAAAUGGAAAAAAAAAAAACGGAAAAAAAAAAAAGGUAAAAAAAAAAAAUAUAAAAAAAAAAAACAUAAAAAAAAAAAACGAAA |
| | | AAAAAAAAACGUAAAAAAAAAAAACUCAAAAAAAAAAAGAUAAAAAAAAAAAACCUAAAAAAAAAAAAUGUAAAAAAAAAAAAGGGAAAAA |
| | | AAAAAAACGCAAAAAAAAAAAACACAAAAAAAAAAAAUGCAAAAAAAAAAAAUCGAAAAAAAAAAAAUCUAAAAAAAAAAAACGAAAAAAA |
| | | AAAAACCCAAAAAAAAAAAAGACAAAAAAAAAAAAUAGAAAAAAAAAAAGUUAAAAAAAAAAAACUGAAAAAAAAAAAAUUUAAAAAAAAA |
| | | AAAUCUAG |
| 15 | Cas9- | augGACGGCUCCGGCGGCGGCUCCCCCAAGAAGAAGCGGAAGGUGGAGGACAAGCGGCCCGCCGCCACCAAGAAGGCCGGCCAGGCCAAGA |
| | Cas9 | AGAAGAAGGGCGGCUCCGGCGGCGGCgccgccuucaagcccaaccccaucaacuacauccugggccuggacaucggcaucgccuccguggg |
| | fusion | cugggccaugguggagaucgacgaggaggagaaccccauccggcugaucgaccugggcgugcggguguucgagcgggccgaggugcccaag |
| | (mRNA D)- | accggcgacucccuggccauggcccgcgggcuggcccgguccguggcgcggcugacccggcgggcggcccaccggcugcuggcggcccggc |
| | ORF | ggcugcugaagcgggagggcgugcugcaggccgccgacuucgacgagaacggccugaucaagucccugcccaacacccccuggcagcugcg |
| | sequence | ggccgccgcccuggaccggaagcugaccccccuggagugguccgccgugcugcugcaccugaucaagcaccggggcuaccugucccagcgg |
| | | aagaacgagggcgagaccgccgacaaggagcugggcgcccugcugaagggcguggccaacaacgcccacgcccugcagaccggcgacuucc |
| | | ggacccccgccgagcuggcccugaacaaguucgagaaggaguccggccacauccggaaccagcggggcgacuacucccacaccuucucccg |
| | | gaaggaccugcaggccgagcugauccugcuguucgagaagcagaaggaguucggcaacccccacguguccggcggccugaaggagggcauc |
| | | gagacccugcugaugacccagcggcccgcccuguccggcgacgccgugcagaagaugcugggccacugcaccuucgagcccgccgagccca |
| | | aggccgccaagaacaccuacaccgccgagcgguucaucuggcugaccaagcugaacaaccugcggauccuggagcagggcuccgagcggcc |
| | | ccugaccgacaccgagcgggccacccugauggacgagcccuaccggaaguccaagcugaccuacgcccaggcccggaagcugcugggccug |
| | | gaggacaccgccuucuucaagggccugcgguacggcaaggacaacgccgaggccuccacccugauggagaugaaggccuaccacgccaucu |
| | | cccgggcccuggagaaggagggccugaaggacaagaaguccccccugaaccuguccuccgagcugcaggacgagaucggcaccgccuucuc |
| | | ccuguucaagaccgacgaggacaucaccggccggcugaaggaccgggugcagcccgagauccuggaggcccugcugaagcacaucuccuuc |
| | | gacaaguucgugcagaucucccugaaggcccugcggcggaucgugccccugauggagcagggcaagcgguacgacgaggccugcgccgaga |
| | | ucuacggcgaccacuacggcaagaagaacaccgaggagaagaucuaccugccccccauccccgccgacgagauccggaaccccguggugcu |
| | | gcgggcccugucccaggcccggaaggugaucaacggcguggugcggcgguacggcucccccgcccggauccacaucgagaccgcccgggag |
| | | gugggcaaguccuucaaggaccggaaggagaucgagaagcggcaggaggagaaccggaaggaccgggagaaggccgccgccaaguuccggg |
| | | aguacuuccccaacuucgugggcgagcccaaguccaaggacauccugaagcugcggcuguacgagcagcagcacggcaagugccuguacuc |
| | | cggcaaggagaucaaccuggugcggcugaacgagaagggcuacguggagaucgaccacgcccugcccuucucccggaccugggacgacucc |
| | | uucaacaacaaggugcuggugcugggcuccgagaaccagaacaagggcaaccagacccccuacgaguacuucaacggcaaggacaacuccc |
| | | gggaguggcaggaguucaaggcccggguggagaccucccgguucccccgguccaagaagcagcggauccugcugcagaaguucgacgagga |
| | | cggcuucaaggagugcaaccugaacgacacccgguacgugaaccgguuccugugccaguucguggccgaccacauccugcugaccggcaag |
| | | ggcaagcggcggguguucgccuccaacggccagaucaccaaccugcugcggggcuucugggcgccugcggaagguggggccgagaacgacc |
| | | ggcaccacgcccuggacgccguggugguggccugcuccaccguggccaugcagcagaagaucacccgguucgugcgguacaaggagaugaa |
| | | cgccuucgacggcaagaccaucgacaaggagaccggcaaggugcugcaccagaagacccacuucccccagcccugggaguucuucgcccag |
| | | gaggugaugauccggguguucggcaagcccgacggcaagcccgaguucgaggaggccgacacccccgagaagcugcggacccugcuggccg |
| | | agaagcuguccucccggcccgaggccgugcacgaguacgugaccccccuguucgugucccgggcccccaaccggaagauguccggcgccca |
| | | caaggacacccugcgguccgccaagcgguucgugaagcacaacgagaagaucuccgugaagcggguguggcugaccgagaucaagcuggcc |
| | | gaccuggagaacauggugaacuacaagaacggccgggagaucgagcuguacgaggcccugaaggcccggcuggaggccuacggcggcaacg |
| | | ccaagcaggccuucgaccccaaggacaaccccuucuacaagaagggcggccagcuggugaaggccgugcggguggagaagacccaggaguc |
| | | cggcgugcugcugaacaagaagaacgccuacaccaucgccgacaacggcgacauggugcggguggacguguucugcaagguggacaagaag |
| | | ggcaagaaccaguacuucaucgugcccaucuacgccuggcagguggccgagaacauccugcccgacaucgacugcaagggcuaccggaucg |
| | | acgacuccuacaccuucugcuucucccugcacaaguacgaccugaucgccuuccagaaggacgagaaguccaagguggaguucgccuacua |
| | | caucaacugcgacuccuccaacggccgguucuaccuggccuggcacgacaagggcuccaaggagcagcaguuccggaucuccacccagaac |
| | | cuggugcugauccagaaguaccaggugaacgagcugggcaaggagauccggcccugccggcugaagaagcggccccccgugcgguag |
| 16 | Cas9- | MDGSGGGSPKKKRKVEDKRPAATKKAGQAKKKKGGSGGGAAFKPNPINYILGLDIGIASVGWAMVEIDEEENPIRLIDLGVRVFERAEVPK |
| | Cas9 | TGDSLAMARRLARSVRRLTRRRAHRLLRARRLLKREGVLQAADFDENGLIKSLPNTPWQLRAAALDRKLTPLEWSAVLLHLI KHRGYLSQR |
| | fusion | KNEGETADKELGALLKGVANNAHALQTGDFRTPAELALNKFEKESGHIRNQRGDYSHTFSRKDLQAELILLFEKQKEFGNPHVSGGLKEGI |
| | (mRNA D)- | ETLLMTQRPALSGDAVQKMLGHCTFEPAEPKAAKNTYTAERFIWLTKLNNLRILEQGSERPLTDTERATLMDEPYRKSKLTYAQARKLLGL |
| | amino | EDTAFFKGLRYGKDNAEASTLMEMKAYHAISRALEKEGLKDKKSPLNLSSELQDEIGTAFSLFKTDEDITGRLKDRVQPEILEALLKHISF |
| | acid | DKFVQISLKALRRIVPLMEQGKRYDEACAEIYGDHYGKKNTEEKIYLPPIPADEIRNPVVLRALSQARKVINGVVRRYGSPARIHIETARE |
| | sequence | VGKSFKDRKEIEKRQEENRKDREKAAAKFREYFPNFVGEPKSKDILKLRLYEQQHGKCLYSGKEINLVRLNEKGYVEIDHALPFSRTWDDS |
| | | FNNKVLVLGSENQNKGNQTPYEYFNGKDNSREWQEFKARVETSRFPRSKKQRILLQKFDEDGFKECNLNDTRYVNRFLCQFVADHILLTGK |
| | | GKRRVFASNGQITNLLRGFWGLRKVRAENDRHHALDAVVVACSTVAMQQKITRFVRYKEMNAFDGKTIDKETGKVLHQKTHFPQPWEFFAQ |
| | | EVMIRVFGKPDGKPEFEEADTPEKLRTLLAEKLSSRPEAVHEYVTPLFVSRAPNRKMSGAHKDTLRSAKRFVKHNEKISVKRVWLTEIKLA |
| | | DLENMVNYKNGREIELYEALKARLEAYGGNAKQAFDPKDNPFYKKGGQLVKAVRVEKTQESGVLLNKKNAYTIADNGDMVRVDVFCKVDKK |
| | | GKNQYFIVPIYAWQVAENILPDIDCKGYRIDDSYTFCFSLHKYDLIAFQKDEKSKVEFAYYINCDSSNGRFYLAWHDKGSKEQQFRISTQN |
| | | LVLIQKYQVNELGKEIRPCRLKKRPPVR* |
| 17 | SpyCas9 | GGGAAGCUCAGAAUAAACGCUCAACUUUGGCCGGAUCUGCCACCAUGGACAAGAAGUACUCCAUCGGCCUGGACAUCGGCACCAACUCCGU |
| | (mRNA E)- | GGGCUGGGCCGUGAUCACCGACGAGUACAAGGUGCCCUCCAAGAAGUUCAAGGUGCUGGGCAACACCGACCGGCACUCCAUCAAGAAGAAC |
| | mRNA | CUGAUCGGCGCCCUGCUGUUCGACUCCGGCGAGACCGCCGAGGCCACCCGGCUGAAGCGGACCGCCCGGCGGCGGUACACCCGGCGGAAGA |
| | sequence | ACCGGAUCUGCUACCUGCAGGAGAUCUUCUCCAACGAGAUGGCCAAGGUGGACGACUCCUUCUUCCACCGGCUGGAGGAGUCCUUCCUGGU |
| | | GGAGGAGGACAAGAAGCACGAGCGGCACCCCAUCUUCGGCAACAUCGUGGACGAGGUGGCCUACCACGAGAAGUACCCCACCAUCUACCAC |
| | | CUGCGGAAGAAGCUGGUGGACUCCACCGACAAGGCCGACCUGCGGCUGAUCUACCUGGCCCUGGCCCACAUGAUCAAGUUCCGGGGCCACU |
| | | UCCUGAUCGAGGGCGACCUGAACCCCGACAACUCCGACGUGGACAAGCUGUUCAUCCAGCUGGUGCAGACCUACAACCAGCUGUUCGAGGA |
| | | GAACCCCAUCAACGCCUCCGGCGUGGACGCCAAGGCCAUCCUGUCCGCCCGGCUGUCCAAGUCCCGGCGGCUGGAGAACCUGAUCGCCCAG |
| | | CUGCCCGGCGAGAAGAAGAACGGCCUGUUCGGCAACCUGAUCGCCCUGUCCCUGGGCCUGACCCCCAACUUCAAGUCCAACUUCGACCUGG |
| | | CCGAGGACGCCAAGCUGCAGCUGUCCAAGGACACCUACGACGACGACCUGGACAACCUGCUGGCCCAGAUCGGCGACCAGUACGCCGACCU |
| | | GUUCCUGGCCGCCAAGAACCUGUCCGACGCCAUCCUGCUGUCCGACAUCCUGCGGGUGAACACCGAGAUCACCAAGGCCCCCCUGUCCGCC |
| | | UCCAUGAUCAAGCGGUACGACGAGCACCACCAGGACCUGACCCUGCUGAAGGCCCUGGUGCGGCAGCAGCUGCCCGAGAAGUACAAGGAGA |
| | | UCUUCUUCGACCAGUCCAAGAACGGCUACGCCGGCUACAUCGACGGCGGCGCCUCCCAGGAGGAGUUCUACAAGUUCAUCAAGCCCAUCCU |
| | | GGAGAAGAUGGACGGCACCGAGGAGCUGCUGGUGAAGCUGAACCGGGAGGACCUGCUGCGGAAGCAGCGGACCUUCGACAACGGCUCCAUC |
| | | CCCCACCAGAUCCACCUGGGCGAGCUGCACGCCAUCCUGCGGCGGCAGGAGGACUUCUACCCCUUCCUGAAGGACAACCGGGAGAAGAUCG |
| | | AGAAGAUCCUGACCUUCCGGAUCCCCUACUACGUGGGCCCCCUGGCCCGGGGCAACUCCCGGUUCGCCUGGAUGACCCGGAAGUCCGAGGA |
| | | GACCAUCACCCCCUGGAACUUCGAGGAGGUGGUGGACAAGGGCGCCUCCGCCCAGUCCUUCAUCGAGCGGAUGACCAACUUCGACAAGAAC |
| | | CUGCCCAACGAGAAGGUGCUGCCCAAGCACUCCCUGCUGUACGAGUACUUCACCGUGUACAACGAGCUGACCAAGGUGAAGUACGUGACCG |
| | | AGGGCAUGCGGAAGCCCGCCUUCCUGUCCGGCGAGCAGAAGAAGGCCAUCGUGGACCUGCUGUUCAAGACCAACCGGAAGGUGACCGUGAA |
| | | GCAGCUGAAGGAGGACUACUUCAAGAAGAUCGAGUGCUUCGACUCCGUGGAGAUCUCCGGCGUGGAGGACCGGUUCAACGCCUCCCUGGGC |
| | | ACCUACCACGACCUGCUGAAGAUCAUCAAGGACAAGGACUUCCUGGACAACGAGGAGAACGAGGACAUCCUGGAGGACAUCGUGCUGACCC |
| | | UGACCCUGUUCGAGGACCGGGAGAUGAUCGAGGAGCGGCUGAAGACCUACGCCCACCUGUUCGACGACAAGGUGAUGAAGCAGCUGAAGCG |
| | | GCGGCGGUACACCGGCUGGGGCCGGCUGUCCCGGAAGCUGAUCAACGGCAUCCGGGACAAGCAGUCCGGCAAGACCAUCCUGGACUUCCUG |
| | | AAGUCCGACGGCUUCGCCAACCGGAACUUCAUGCAGCUGAUCCACGACGACUCCCUGACCUUCAAGGAGGACAUCCAGAAGGCCCAGGUGU |
| | | CCGGCCAGGGCGACUCCCUGCACGAGCACAUCGCCAACCUGGCCGGCUCCCCCGCCAUCAAGAAGGGCAUCCUGCAGACCGUGAAGGUGGU |
| | | GGACGAGCUGGUGAAGGUGAUGGGCCGGCACAAGCCCGAGAACAUCGUGAUCGAGAUGGCCCGGGAGAACCAGACCACCCAGAAGGGCCAG |
| | | AAGAACUCCCGGGAGCGGAUGAAGCGGAUCGAGGAGGGCAUCAAGGAGCUGGGCUCCCAGAUCCUGAAGGAGCACCCCGUGGAGAACACCC |
| | | AGCUGCAGAACGAGAAGCUGUACCUGUACUACCUGCAGAACGGCCGGGACAUGUACGUGGACCAGGAGCUGGACAUCAACCGGCUGUCCGA |
| | | CUACGACGUGGACCACAUCGUGCCCCAGUCCUUCCUGAAGGACGACUCCAUCGACAACAAGGUGCUGACCCGGUCCGACAAGAACCGGGGC |
| | | AAGUCCGACAACGUGCCCUCCGAGGAGGUGGUGAAGAAGAUGAAGAACUACUGGCGGCAGCUGCUGAACGCCAAGCUGAUCACCCAGCGGA |
| | | AGUUCGACAACCUGACCAAGGCCGAGCGGGGCGGCCUGUCCGAGCUGGACAAGGCCGGCUUCAUCAAGCGGCAGCUGGUGGAGACCCGGCA |
| | | GAUCACCAAGCACGUGGCCCAGAUCCUGGACUCCCGGAUGAACACCAAGUACGACGAGAACGACAAGCUGAUCCGGGAGGUGAAGGUGAUC |
| | | ACCCUGAAGUCCAAGCUGGUGUCCGACUUCCGGAAGGACUUCCAGUUCUACAAGGUGCGGGAGAUCAACAACUACCACCACGCCCACGACG |
| | | CCUACCUGAACGCCGUGGUGGGCACCGCCCUGAUCAAGAAGUACCCCAAGCUGGAGUCCGAGUUCGUGUACGGCGACUACAAGGUGUACGA |
| | | CGUGCGGAAGAUGAUCGCCAAGUCCGAGCAGGAGAUCGGCAAGGCCACCGCCAAGUACUUCUUCUACUCCAACAUCAUGAACUUCUUCAAG |
| | | ACCGAGAUCACCCUGGCCAACGGCGAGAUCCGGAAGCGGCCCCUGAUCGAGACCAACGGCGAGACCGGCGAGAUCGUGUGGGACAAGGGCC |
| | | GGGACUUCGCCACCGUGCGGAAGGUGCUGUCCAUGCCCCAGGUGAACAUCGUGAAGAAGACCGAGGUGCAGACCGGCGGCUUCUCCAAGGA |
| | | GUCCAUCCUGCCCAAGCGGAACUCCGACAAGCUGAUCGCCCGGAAGAAGGACUGGGACCCCAAGAAGUACGGCGGCUUCGACUCCCCCACC |
| | | GUGGCCUACUCCGUGCUGGUGGUGGCCAAGGUGGAGAAGGGCAAGUCCAAGAAGCUGAAGUCCGUGAAGGAGCUGCUGGGCAUCACCAUCA |
| | | UGGAGCGGUCCUCCUUCGAGAAGAACCCCAUCGACUUCCUGGAGGCCAAGGGCUACAAGGAGGUGAAGAAGGACCUGAUCAUCAAGCUGCC |
| | | CAAGUACUCCCUGUUCGAGCUGGAGAACGGCCGGAAGCGGAUGCUGGCCUCCGCCGGCGAGCUGCAGAAGGGCAACGAGCUGGCCCUGCCC |
| | | UCCAAGUACGUGAACUUCCUGUACCUGGCCUCCCACUACGAGAAGCUGAAGGGCUCCCCCGAGGACAACGAGCAGAAGCAGCUGUUCGUGG |
| | | AGCAGCACAAGCACUACCUGGACGAGAUCAUCGAGCAGAUCUCCGAGUUCUCCAAGCGGGUGAUCCUGGCCGACGCCAACCUGGACAAGGU |
| | | GCUGUCCGCCUACAACAAGCACCGGGACAAGCCCAUCCGGGAGCAGGCCGAGAACAUCAUCCACCUGUUCACCCUGACCAACCUGGGCGCC |
| | | CCCGCCGCCUUCAAGUACUUCGACACCACCAUCGACCGGAAGCGGUACACCUCCACCAAGGAGGUGCUGGACGCCACCCUGAUCCACCAGU |
| | | CCAUCACCGGCCUGUACGAGACCCGGAUCGACCUGUCCCAGCUGGGGGGCGACGGCGGCGGCUCCCCCAAGAAGAAGCGGAAGGUGUGACU |
| | | AGCACCAGCCUCAAGAACACCCGAAUGGAGUCUCUAAGCUACAUAAUACCAACUUACACUUUACAAAAUGUUGUCCCCCAAAAUGUAGCCA |
| | | UUCGUAUCUGCUCCUAAUAAAAAGAAAGUUUCUUCACAUUCUCUCGAGAAAAAAAAAAAAAAAAAAAAAAAAAAAAAAAAAAAAAAAAAAA |
| | | AAAAAAAAAAAAAAAAAAAAAAAAAAAAAAAAAAAAAAAAAAAAAAAAAAUCUAG |
| 18 | SpyCas9 | auggacaagaaguacuccaucggccuggacaucggcaccaacuccgugggcugggccgugaucaccgacgaguacaaggugcccuccaaga |
| | (mRNA E)- | aguucaaggugcugggcaacaccgaccggcacuccaucaagaagaaccugaucggcgcccugcuguucgacuccggcgagaccgccgaggc |
| | ORF | cacccggcugaagcggaccgcccggcggcgguacacccggcggaagaaccggaucugcuaccugcaggagaucuucuccaacgagauggcc |
| | sequence | aagguggacgacuccuucuuccaccggcuggaggaguccuuccugguggaggaggacaagaagcacgagcggcaccccaucuucggcaaca |
| | | ucguggacgagguggccuaccacgagaaguaccccaccaucuaccaccugcggaagaagcugguggacuccaccgacaaggccgaccugcg |
| | | gcugaucuaccuggcccuggcccacaugaucaaguuccggggccacuuccugaucgagggcgaccugaaccccgacaacuccgacguggac |
| | | aagcuguucauccagcuggugcagaccuacaaccagcuguucgaggagaaccccaucaacgccuccggcguggacgccaaggccauccugu |
| | | ccgcccggcuguccaagucccggcggcuggagaaccugaucgcccagcugcccggcgagaagaagaacggccuguucggcaaccugaucgc |
| | | ccugucccugggccugacccccaacuucaaguccaacuucgaccuggccgaggacgccaagcugcagcuguccaaggacaccuacgacgac |
| | | gaccuggacaaccugcuggcccagaucggcgaccaguacgccgaccuguuccuggccgccaagaaccuguccgacgccauccugcuguccg |
| | | acauccugcgggugaacaccgagaucaccaaggccccccuguccgccuccaugaucaagcgguacgacgagcaccaccaggaccugacccu |
| | | gcugaaggcccuggugcggcagcagcugcccgagaaguacaaggagaucuucuucgaccaguccaagaacggcuacgccggcuacaucgac |
| | | ggcggcgccucccaggaggaguucuacaaguucaucaagcccauccuggagaagauggacggcaccgaggagcugcuggugaagcugaacc |
| | | gggaggaccugcugcggaagcagcggaccuucgacaacggcuccaucccccaccagauccaccugggcgagcugcacgccauccugcggcg |
| | | gcaggaggacuucuaccccuuccugaaggacaaccgggagaagaucgagaagauccugaccuuccggauccccuacuacgugggcccccug |
| | | gcccggggcaacucccgguucgccuggaugacccggaaguccgaggagaccaucacccccuggaacuucgaggaggugguggacaagggcg |
| | | ccuccgcccaguccuucaucgagcggaugaccaacuucgacaagaaccugcccaacgagaaggugcugcccaagcacucccugcuguacga |
| | | guacuucaccguguacaacgagcugaccaaggugaaguacgugaccgagggcaugcggaagcccgccuuccuguccggcgagcagaagaag |
| | | gccaucguggaccugcuguucaagaccaaccggaaggugaccgugaagcagcugaaggaggacuacuucaagaagaucgagugcuucgacu |
| | | ccguggagaucuccggcguggaggaccgguucaacgccucccugggcaccuaccacgaccugcugaagaucaucaaggacaaggacuuccu |
| | | ggacaacgaggagaacgaggacauccuggaggacaucgugcugacccugacccuguucgaggaccgggagaugaucgaggagcggcugaag |
| | | accuacgcccaccuguucgacgacaaggugaugaagcagcugaagcggcggcgguacaccggcuggggccggcugucccggaagcugauca |
| | | acggcauccgggacaagcaguccggcaagaccauccuggacuuccugaaguccgacggcuucgccaaccggaacuucaugcagcugaucca |
| | | cgacgacucccugaccuucaaggaggacauccagaaggcccagguguccggccagggcgacucccugcacgagcacaucgccaaccuggcc |
| | | ggcucccccgccaucaagaagggcauccugcagaccgugaaggugguggacgagcuggugaaggugaugggccggcacaagcccgagaaca |
| | | ucgugaucgagauggcccgggagaaccagaccacccagaagggccagaagaacucccgggagcggaugaagcggaucgaggagggcaucaa |
| | | ggagcugggcucccagauccugaaggagcaccccguggagaacacccagcugcagaacgagaagcuguaccuguacuaccugcagaacggc |
| | | cgggacauguacguggaccaggagcuggacaucaaccggcuguccgacuacgacguggaccacaucgugccccaguccuuccugaaggacg |
| | | acuccaucgacaacaaggugcugacccgguccgacaagaaccggggcaaguccgacaacgugcccuccgaggagguggugaagaagaugaa |
| | | gaacuacuggcggcagcugcugaacgccaagcugaucacccagcggaaguucgacaaccugaccaaggccgagcggcggggccuguccgag |
| | | cuggacaaggccggcuucaucaagcggcagcugguggagacccggcagaucaccaagcacguggcccagauccuggacucccggaugaaca |
| | | ccaaguacgacgagaacgacaagcugauccgggaggugaaggugaucacccugaaguccaagcugguguccgacuuccggaaggacuucca |
| | | guucuacaaggugcgggagaucaacaacuaccaccacgcccacgacgccuaccugaacgccguggugggcaccgcccugaucaagaaguac |
| | | cccaagcuggaguccgaguucguguacggcgacuacaagguguacgacgugcggaagaugaucgccaaguccgagcaggagaucggcaagg |
| | | ccaccgccaaguacuucuucuacuccaacaucaugaacuucuucaagaccgagaucacccuggccaacggcgagauccggaagcggccccu |
| | | gaucgagaccaacggcgagaccggcgagaucgugugggacaagggccgggacuucgccaccgugcggaaggugcuguccaugccccaggug |
| | | aacaucgugaagaagaccgaggugcagaccggcggcuucuccaaggaguccauccugcccaagcggaacuccgacaagcugaucgcccgga |
| | | agaaggacugggaccccaagaaguacggcggcuucgacucccccaccguggccuacuccgugcuggugguggccaagguggagaagggcaa |
| | | guccaagaagcugaaguccgugaaggagcugcugggcaucaccaucauggagcgguccuccuucgagaagaaccccaucgacuuccuggag |
| | | gccaagggcuacaaggaggugaagaaggaccugaucaucaagcugcccaaguacucccuguucgagcuggagaacggccggaagcggaugc |
| | | uggccuccgccggcgagcugcagaagggcaacgagcuggcccugcccuccaaguacgugaacuuccuguaccuggccucccacuacgagaa |
| | | gcugaagggcucccccgaggacaacgagcagaagcagcuguucguggagcagcacaagcacuaccuggacgagaucaucgagcagaucucc |
| | | gaguucuccaagcgggugauccuggccgacgccaaccuggacaaggugcuguccgccuacaacaagcaccgggacaagcccauccgggagc |
| | | aggccgagaacaucauccaccuguucacccugaccaaccugggcgcccccgccgccuucaaguacuucgacaccaccaucgaccggaagcg |
| | | guacaccuccaccaaggaggugcuggacgccacccugauccaccaguccaucaccggccuguacgagacccggaucgaccugucccagcug |
| | | ggcggcgacggcggcggcucccccaagaagaagcggaagguguga |
| 19 | SpyCas9 | MDKKYSIGLDIGTNSVGWAVITDEYKVPSKKFKVLGNTDRHSIKKNLIGALLFDSGETAEATRLKRTARRRYTRRKNRICYLQEIFSNEMA |
| | (mRNA E)- | KVDDSFFHRLEESFLVEEDKKHERHPIFGNIVDEVAYHEKYPTIYHLRKKLVDSTDKADLRLIYLALAHMIKFRGHFLIEGDLNPDNSDVD |
| | amino | KLFIQLVQTYNQLFEENPINASGVDAKAILSARLSKSRRLENLIAQLPGEKKNGLFGNLIALSLGLTPNFKSNFDLAEDAKLQLSKDTYDD |
| | acid | DLDNLLAQIGDQYADLFLAAKNLSDAILLSDILRVNTEITKAPLSASMIKRYDEHHQDLTLLKALVRQQLPEKYKEIFFDQSKNGYAGYID |
| | sequence | GGASQEEFYKFIKPILEKMDGTEELLVKLNREDLLRKQRTFDNGSIPHQIHLGELHAILRRQEDFYPFLKDNREKIEKILTFRIPYYVGPL |
| | | ARGNSRFAWMTRKSEETITPWNFEEVVDKGASAQSFIERMTNFDKNLPNEKVLPKHSLLYEYFTVYNELTKVKYVTEGMRKPAFLSGEQKK |
| | | AIVDLLFKTNRKVTVKQLKEDYFKKIECFDSVEISGVEDRFNASLGTYHDLLKIIKDKDFLDNEENEDILEDIVLTLTLFEDREMIEERLK |
| | | TYAHLFDDKVMKQLKRRRYTGWGRLSRKLINGIRDKQSGKTILDFLKSDGFANRNFMQLIHDDSLTFKEDIQKAQVSGQGDSLHEHIANLA |
| | | GSPAIKKGILQTVKVVDELVKVMGRHKPENIVIEMARENQTTQKGQKNSRERMKRIEEGIKELGSQILKEHPVENTQLQNEKLYLYYLQNG |
| | | RDMYVDQELDINRLSDYDVDHIVPQSFLKDDSIDNKVLTRSDKNRGKSDNVPSEEVVKKMKNYWRQLLNAKLITQRKFDNLTKAERGGLSE |
| | | LDKAGFIKRQLVETRQITKHVAQILDSRMNTKYDENDKLIREVKVITLKSKLVSDFRKDFQFYKVREINNYHHAHDAYLNAVVGTALIKKY |
| | | PKLESEFVYGDYKVYDVRKMIAKSEQEIGKATAKYFFYSNIMNFFKTEITLANGEIRKRPLIETNGETGEIVWDKGRDFATVRKVLSMPQV |
| | | NIVKKTEVQTGGFSKESILPKRNSDKLIARKKDWDPKKYGGFDSPTVAYSVLVVAKVEKGKSKKLKSVKELLGITIMERSSFEKNPIDFLE |
| | | AKGYKEVKKDLIIKLPKYSLFELENGRKRMLASAGELQKGNELALPSKYVNFLYLASHYEKLKGSPEDNEQKQLFVEQHKHYLDEIIEQIS |
| | | EFSKRVILADANLDKVLSAYNKHRDKPIREQAENIIHLFTLTNLGAPAAFKYFDTTIDRKRYTSTKEVLDATLIHQSITGLYETRIDLSQL |
| | | GGDGGGSPKKKRKV* |
| 20 | Nme2Cas9 | GGGAAGCUCAGAAUAAACGCUCAACUUUGGCCGGAUCUGCCACCAUGACCGGUGCCGCCUUCAAGCCCAACCCCAUCAACUACAUCCUGGG |
| | (mRNA F)- | CCUGGACAUCGGCAUCGCCUCCGUGGGCUGGGCCAUGGUGGAGAUCGACGAGGAGGAGAACCCCAUCCGGCUGAUCGACCUGGGCGUGCGG |
| | mRNA | GUGUUCGAGCGGGCCGAGGUGCCCAAGACCGGCGACUCCCUGGCCAUGGCCCGGCGGCUGGCCCGGUCCGUGCGGCGGCUGACCCGGCGGC |
| | sequence | GGGCCCACCGGCUGCUGCGGGCCCGGCGGCUGCUGAAGCGGGAGGGCGUGCUGCAGGCCGCCGACUUCGACGAGAACGGCCUGAUCAAGUC |
| | | CCUGCCCAACACCCCCUGGCAGCUGCGGGCCGCCGCCCUGGACCGGAAGCUGACCCCCCUGGAGUGGUCCGCCGUGCUGCUGCACCUGAUC |
| | | AAGCACCGGGGCUACCUGUCCCAGCGGAAGAACGAGGGCGAGACCGCCGACAAGGAGCUGGGCGCCCUGCUGAAGGGCGUGGCCAACAACG |
| | | CCCACGCCCUGCAGACCGGCGACUUCCGGACCCCCGCCGAGCUGGCCCUGAACAAGUUCGAGAAGGAGUCCGGCCACAUCCGGAACCAGCG |
| | | GGGCGACUACUCCCACACCUUCUCCCGGAAGGACCUGCAGGCCGAGCUGAUCCUGCUGUUCGAGAAGCAGAAGGAGUUCGGCAACCCCCAC |
| | | GUGUCCGGCGGCCUGAAGGAGGGCAUCGAGACCCUGCUGAUGACCCAGCGGCCCGCCCUGUCCGGCGACGCCGUGCAGAAGAUGCUGGGCC |
| | | ACUGCACCUUCGAGCCCGCCGAGCCCAAGGCCGCCAAGAACACCUACACCGCCGAGCGGUUCAUCUGGCUGACCAAGCUGAACAACCUGCG |
| | | GAUCCUGGAGCAGGGCUCCGAGCGGCCCCUGACCGACACCGAGCGGGCCACCCUGAUGGACGAGCCCUACCGGAAGUCCAAGCUGACCUAC |
| | | GCCCAGGCCCGGAAGCUGCUGGGCCUGGAGGACACCGCCUUCUUCAAGGGCCUGCGGUACGGCAAGGACAACGCCGAGGCCUCCACCCUGA |
| | | UGGAGAUGAAGGCCUACCACGCCAUCUCCCGGGCCCUGGAGAAGGAGGGCCUGAAGGACAAGAAGUCCCCCCUGAACCUGUCCUCCGAGCU |
| | | GCAGGACGAGAUCGGCACCGCCUUCUCCCUGUUCAAGACCGACGAGGACAUCACCGGCCGGCUGAAGGACCGGGUGCAGCCCGAGAUCCUG |
| | | GAGGCCCUGCUGAAGCACAUCUCCUUCGACAAGUUCGUGCAGAUCUCCCUGAAGGCCCUGCGGCGGAUCGUGCCCCUGAUGGAGCAGGGCA |
| | | AGCGGUACGACGAGGCCUGCGCCGAGAUCUACGGCGACCACUACGGCAAGAAGAACACCGAGGAGAAGAUCUACCUGCCCCCCAUCCCCGC |
| | | CGACGAGAUCCGGAACCCCGUGGUGCUGCGGGCCCUGUCCCAGGCCCGGAAGGUGAUCAACGGCGUGGUGCGGCGGUACGGCUCCCCCGCC |
| | | CGGAUCCACAUCGAGACCGCCCGGGAGGUGGGCAAGUCCUUCAAGGACCGGAAGGAGAUCGAGAAGCGGCAGGAGGAGAACCGGAAGGACC |
| | | GGGAGAAGGCCGCCGCCAAGUUCCGGGAGUACUUCCCCAACUUCGUGGGCGAGCCCAAGUCCAAGGACAUCCUGAAGCUGCGGCUGUACGA |
| | | GCAGCAGCACGGCAAGUGCCUGUACUCCGGCAAGGAGAUCAACCUGGUGCGGCUGAACGAGAAGGGCUACGUGGAGAUCGACCACGCCCUG |
| | | CCCUUCUCCCGGACCUGGGACGACUCCUUCAACAACAAGGUGCUGGUGCUGGGCUCCGAGAACCAGAACAAGGGCAACCAGACCCCCUACG |
| | | AGUACUUCAACGGCAAGGACAACUCCCGGGAGUGGCAGGAGUUCAAGGCCCGGGUGGAGACCUCCCGGUUCCCCCGGUCCAAGAAGCAGCG |
| | | GAUCCUGCUGCAGAAGUUCGACGAGGACGGCUUCAAGGAGUGCAACCUGAACGACACCCGGUACGUGAACCGCUUCCUGUGCCAGUUCGUG |
| | | GCCGACCACAUCCUGCUGACCGGCAAGGGCAAGCGGCGGGUGUUCGCCUCCAACGGCCAGAUCACCAACCUGCUGCGGGGCUUCUGGGGCC |
| | | UGCGGAAGGUGCGGGCCGAGAACGACCGGCACCACGCCCUGGACGCCGUGGUGGUGGCCUGCUCCACCGUGGCCAUGCAGCAGAAGAUCAC |
| | | CCGGUUCGUGCGGUACAAGGAGAUGAACGCCUUCGACGGCAAGACCAUCGACAAGGAGACCGGCAAGGUGCUGCACCAGAAGACCCACUUC |
| | | CCCCAGCCCUGGGAGUUCUUCGCCCAGGAGGUGAUGAUCCGGGUGUUCGGCAAGCCCGACGGCAAGCCCGAGUUCGAGGAGGCCGACACCC |
| | | CCGAGAAGCUGCGGACCCUGCUGGCCGAGAAGCUGUCCUCCCGGCCCGAGGCCGUGCACGAGUACGUGACCCCCCUGUUCGUGUCCCGGGC |
| | | CCCCAACCGGAAGAUGUCCGGCGCCCACAAGGACACCCUGCGGUCCGCCAAGCGGUUCGUGAAGCACAACGAGAAGAUCUCCGUGAAGCGG |
| | | GUGUGGCUGACCGAGAUCAAGCUGGCCGACCUGGAGAACAUGGUGAACUACAAGAACGGCCGGGAGAUCGAGCUGUACGAGGCCCUGAAGG |
| | | CCCGGCUGGAGGCCUACGGCGGCAACGCCAAGCAGGCCUUCGACCCCAAGGACAACCCCUUCUACAAGAAGGGCGGCCAGCUGGUGAAGGC |
| | | CGUGCGGGUGGAGAAGACCCAGGAGUCCGGCGUGCUGCUGAACAAGAAGAACGCCUACACCAUCGCCGACAACGGCGACAUGGUGCGGGUG |
| | | GACGUGUUCUGCAAGGUGGACAAGAAGGGCAAGAACCAGUACUUCAUCGUGCCCAUCUACGCCUGGCAGGUGGCCGAGAACAUCCUGCCCG |
| | | ACAUCGACUGCAAGGGCUACCGGAUCGACGACUCCUACACCUUCUGCUUCUCCCUGCACAAGUACGACCUGAUCGCCUUCCAGAAGGACGA |
| | | GAAGUCCAAGGUGGAGUUCGCCUACUACAUCAACUGCGACUCCUCCAACGGCCGGUUCUACCUGGCCUGGCACGACAAGGGCUCCAAGGAG |
| | | CAGCAGUUCCGGAUCUCCACCCAGAACCUGGUGCUGAUCCAGAAGUACCAGGUGAACGAGCUGGGCAAGGAGAUCCGGCCCUGCCGGCUGA |
| | | AGAAGCGGCCCCCCGUGCGGUCCGGAAAGCGGACCGCCGACGGCUCCGAGUUCGAGUCCCCCAAGAAGAAGCGGAAGGUGGAGUAGCUAGC |
| | | ACCAGCCUCAAGAACACCCGAAUGGAGUCUCUAAGCUACAUAAUACCAACUUACACUUUACAAAAUGUUGUCCCCCAAAAUGUAGCCAUUC |
| | | GUAUCUGCUCCUAAUAAAAAGAAAGUUUCUUCACAUUCUCUCGAGAAAAAAAAAAAAUGGAAAAAAAAAAAACGGAAAAAAAAAAAAGGUA |
| | | AAAAAAAAAAAUAUAAAAAAAAAAAACAUAAAAAAAAAAAACGAAAAAAAAAAAACGUAAAAAAAAAAAACUCAAAAAAAAAAAAGAUAAA |
| | | AAAAAAAAACCUAAAAAAAAAAAAUGUAAAAAAAAAAAAGGGAAAAAAAAAAAACGCAAAAAAAAAAAACACAAAAAAAAAAAAUGCAAAA |
| | | AAAAAAAAUCGAAAAAAAAAAAAUCUAAAAAAAAAAAACGAAAAAAAAAAAACCCAAAAAAAAAAAAGACAAAAAAAAAAAAUAGAAAAAA |
| | | AAAAAAGUUAAAAAA |
| 21 | Nme2Ca9 | augaccggugccgccuucaagcccaaccccaucaacuacauccugggccuggacaucggcaucgccuccgugggcugggccaugguggaga |
| | (mRNA F)- | ucgacgaggaggagaaccccauccggcugaucgaccugggcgugcggguguucgagcgggccgaggugcccaagaccggcgacucccuggc |
| | ORF | cauggcccggcggcuggcccgguccgugcggcggcugacccgggcggcggcccaccggcugcugcggcgcccggcggcugcugaaggggag |
| | sequence | ggcgugcugcaggccgccgacuucgacgagaacggccugaucaagucccugcccaacacccccuggcagcugcgggccgccgcccuggacc |
| | | ggaagcugaccccccuggagugguccgccgugcugcugcaccugaucaagcaccggggcuaccugucccagcggaagaacgagggcgagac |
| | | cgccgacaaggagcugggcgcccugcugaagggcguggccaacaacgcccacgcccugcagaccggcgacuuccggacccccgccgagcug |
| | | gcccugaacaaguucgagaaggaguccggccacauccggaaccagcggggcgacuacucccacaccuucucccggaaggaccugcaggccg |
| | | agcugauccugcuguucgagaagcagaaggaguucggcaacccccacguguccggcggccugaaggagggcaucgagacccugcugaugac |
| | | ccagcggcccgcccuguccggcgacgccgugcagaagaugcugggccacugcaccuucgagcccgccgagcccaaggccgccaagaacacc |
| | | uacaccgccgagcgguucaucuggcugaccaagcugaacaaccugcggauccuggagcagggcuccgagcggccccugaccgacaccgagc |
| | | gggccacccugauggacgagcccuaccggaaguccaagcugaccuacgcccaggcccggaagcugcuggcgccuggaggacaccgccuuuu |
| | | caagggccugcgguacggcaaggacaacgccgaggccuccacccugauggagaugaaggccuaccacgccaucucccgggcccuggagaag |
| | | gagggccugaaggacaagaaguccccccugaaccuguccuccgagcugcaggacgagaucggcaccgccuucucccuguucaagaccgacg |
| | | aggacaucaccggccggcugaaggaccgggugcagcccgagauccuggaggcccugcugaagcacaucuccuucgacaaguucgugcagau |
| | | cucccugaaggcccugcggcggaucgugccccugauggagcagggcaagcgguacgacgaggccugcgccgagaucuacggcgaccacuac |
| | | ggcaagaagaacaccgaggagaagaucuaccugccccccauccccgccgacgagauccggaaccccguggugcugcgggcccugucccagg |
| | | cccggaaggugaucaacggcguggugcggcgguacggcucccccgcccggauccacaucgagaccgcccgggaggugggcaaguccuucaa |
| | | ggaccggaaggagaucgagaagcggcaggaggagaaccggaaggaccgggagaaggccgccgccaaguuccgggaguacuuccccaacuuc |
| | | gugggcgagcccaaguccaaggacauccugaagcugcggcuguacgagcagcagcacggcaagugccuguacuccggcaaggagaucaacc |
| | | uggugcggcugaacgagaagggcuacguggagaucgaccacgcccugcccuucucccggaccugggacgacuccuucaacaacaaggugcu |
| | | ggugcugggcuccgagaaccagaacaagggcaaccagacccccuacgaguacuucaacggcaaggacaacucccgggaguggcaggaguuc |
| | | aaggcccggguggagaccucccgguucccccgguccaagaagcagcggauccugcugcagaaguucgacgaggacggcuucaaggagugca |
| | | accugaacgacacccgguacgugaaccgcuuccugugccaguucguggccgaccacauccugcugaccggcaagggcaaggcggcgguguu |
| | | cgccuccaacggccagaucaccaaccugcugcggggcuucugcgggccugcggaagguggggccgagaacgaccggcaccacgcccuggac |
| | | gccguggugguggccugcuccaccguggccaugcagcagaagaucacccgguucgugcgguacaaggagaugaacgccuucgacggcaaga |
| | | ccaucgacaaggagaccggcaaggugcugcaccagaagacccacuucccccagcccugggaguucuucgcccaggaggugaugauccgggu |
| | | guucggcaagcccgacggcaagcccgaguucgaggaggccgacacccccgagaagcugcggacccugcuggccgagaagcuguccucccgg |
| | | cccgaggccgugcacgaguacgugaccccccuguucgugucccgggcccccaaccggaagauguccggcgcccacaaggacacccugcggu |
| | | ccgccaagcgguucgugaagcacaacgagaagaucuccgugaagcggguguggcugaccgagaucaagcuggccgaccuggagaacauggu |
| | | gaacuacaagaacggccgggagaucgagcuguacgaggcccugaaggcccggcuggaggccuacgggcgcaacgccaagcaggccuucgac |
| | | cccaaggacaaccccuucuacaagaagggcggccagcuggugaaggccgugcggguggagaagacccaggaguccggcgugcugcugaaca |
| | | agaagaacgccuacaccaucgccgacaacggcgacauggugcggguggacguguucugcaagguggacaagaagggcaagaaccaguacuu |
| | | caucgugcccaucuacgccuggcagguggccgagaacauccugcccgacaucgacugcaagggcuaccggaucgacgacuccuacaccuuc |
| | | ugcuucucccugcacaaguacgaccugaucgccuuccagaaggacgagaaguccaagguggaguucgccuacuacaucaacugcgacuccu |
| | | ccaacggccgguucuaccuggccuggcacgacaagggcuccaaggagcagcaguuccggaucuccacccagaaccuggugcugauccagaa |
| | | guaccaggugaacgagcugggcaaggagauccggcccugccggcugaagaagcggccccccgugcgguccggaaagcggaccgccgacggc |
| | | uccgaguucgagucccccaagaagaagcggaagguggaguag |
| 22 | Nme2Cas9 | MTGAAFKPNPINYILGLDIGIASVGWAMVEIDEEENPIRLIDLGVRVFERAEVPKTGDSLAMARRLARSVRRLTRRRAHRLLRARRLLKRE |
| | (mRNA F)- | GVLQAADFDENGLIKSLPNTPWQLRAAALDRKLTPLEWSAVLLHLIKHRGYLSQRKNEGETADKELGALLKGVANNAHALQTGDFRTPAEL |
| | amino | ALNKFEKESGHIRNQRGDYSHTFSRKDLQAELILLFEKQKEFGNPHVSGGLKEGIETLLMTQRPALSGDAVQKMLGHCTFEPAEPKAAKNT |
| | acid | YTAERFIWLTKLNNLRILEQGSERPLTDTERATLMDEPYRKSKLTYAQARKLLGLEDTAFFKGLRYGKDNAEASTLMEMKAYHAISRALEK |
| | sequence | EGLKDKKSPLNLSSELQDEIGTAFSLFKTDEDITGRLKDRVQPEILEALLKHISFDKFVQISLKALRRIVPLMEQGKRYDEACAEIYGDHY |
| | | GKKNTEEKIYLPPIPADEIRNPVVLRALSQARKVINGVVRRYGSPARIHIETAREVGKSFKDRKEIEKRQEENRKDREKAAAKFREYFPNF |
| | | VGEPKSKDILKLRLYEQQHGKCLYSGKEINLVRLNEKGYVEIDHALPFSRTWDDSFNNKVLVLGSENQNKGNQTPYEYFNGKDNSREWQEF |
| | | KARVETSRFPRSKKQRILLQKFDEDGFKECNLNDTRYVNRFLCQFVADHILLTGKGKRRVFASNGQITNLLRGFWGLRKVRAENDRHHALD |
| | | AVVVACSTVAMQQKITRFVRYKEMNAFDGKTIDKETGKVLHQKTHFPQPWEFFAQEVMIRVFGKPDGKPEFEEADTPEKLRTLLAEKLSSR |
| | | PEAVHEYVTPLFVSRAPNRKMSGAHKDTLRSAKRFVKHNEKISVKRVWLTEIKLADLENMVNYKNGREIELYEALKARLEAYGGNAKQAFD |
| | | PKDNPFYKKGGQLVKAVRVEKTQESGVLLNKKNAYTIADNGDMVRVDVFCKVDKKGKNQYFIVPIYAWQVAENILPDIDCKGYRIDDSYTF |
| | | CFSLHKYDLIAFQKDEKSKVEFAYYINCDSSNGRFYLAWHDKGSKEQQFRISTQNLVLIQKYQVNELGKEIRPCRLKKRPPVRSGKRTADG |
| | | SEFESPKKKRKVE* |
| 23 | Nme2Cas9 | GGGAAGCUCAGAAUAAACGCUCAACUUUGGCCGGAUCUGCCACCAUGGACGGCUCCGGGGGGGGCUCCCCCAAGAAGAAGCGGAAGGUGGA |
| | Intein | GGACAAGCGGCCCGCCGCCACCAAGAAGGCCGGCCAGGCCAAGAAGAAGAAGGGCGGCUCCGGGGGGGGCGCCGCCUUCAAGCCCAACCCC |
| | (mRNA G)- | AUCAACUACAUCCUGGGCCUGGACAUCGGCAUCGCCUCCGUGGGCUGGGCCAUGGUGGAGAUCGACGAGGAGGAGAACCCCAUCCGGCUGA |
| | mRNA | UCGACCUGGGCGUGCGGGUGUUCGAGCGGGCCGAGGUGCCCAAGACCGGCGACUCCCUGGCCAUGGCCCGGCGGCUGGCCCGGUCCGUGCG |
| | sequence | GCGGCUGACCCGGCGGCGGGCCCACCGGCUGCUGCGGGCCCGGCGGCUGCUGAAGCGGGAGGGCGUGCUGCAGGCCGCCGACUUCGACGAG |
| | | AACGGCCUGAUCAAGUCCCUGCCCAACACCCCCUGGCAGCUGCGGGCCGCCGCCCUGGACCGGAAGCUGACCCCCCUGGAGUGGUCCGCCG |
| | | UGCUGCUGCACCUGAUCAAGCACCGGGGCUACCUGUCCCAGCGGAAGAACGAGGGCGAGACCGCCGACAAGGAGCUGGGCGCCCUGCUGAA |
| | | GGGCGUGGCCAACAACGCCCACGCCCUGCAGACCGGCGACUUCCGGACCCCCGCCGAGCUGGCCCUGAACAAGUUCGAGAAGGAGUCCGGC |
| | | CACAUCCGGAACCAGCGGGGCGACUACUCCCACACCUUCUCCCGGAAGGACCUGCAGGCCGAGCUGAUCCUGCUGUUCGAGAAGCAGAAGG |
| | | AGUUCGGCAACCCCCACGUGUCCGGCGGCCUGAAGGAGGGCAUCGAGACCCUGCUGAUGACCCAGCGGCCCGCCCUGUCCGGCGACGCCGU |
| | | GCAGAAGAUGCUGGGCCACUGCACCUUCGAGCCCGCCGAGCCCAAGGCCGCCAAGAACACCUACACCGCCGAGCGGUUCAUCUGGCUGACC |
| | | AAGCUGAACAACCUGCGGAUCCUGGAGCAGGGCUCCGAGCGGCCCCUGACCGACACCGAGCGGGCCACCCUGAUGGACGAGCCCUACCGGA |
| | | AGUCCAAGCUGACCUACGCCCAGGCCCGGAAGCUGCUGGGCCUGGAGGACACCGCCUUCUUCAAGGGCCUGCGGUACGGCAAGGACAACGC |
| | | CGAGGCCUCCACCCUGAUGGAGAUGAAGGCCUACCACGCCAUCUCCCGGGCCCUGGAGAAGGAGGGCCUGAAGGACAAGAAGUCCCCCCUG |
| | | AACCUGUCCUCCGAGCUGCAGGACGAGAUCGGCACCGCCUUCUCCCUGUUCAAGACCGACGAGGACAUCACCGGCCGGCUGAAGGACCGGG |
| | | UGCAGCCCGAGAUCCUGGAGGCCCUGCUGAAGCACAUCUCCUUCGACAAGUUCGUGCAGAUCUCCCUGAAGGCCCUGCGGCGGAUCGUGCC |
| | | CCUGAUGGAGCAGGGCAAGCGGUACGACGAGGCCUGCGCCGAGAUCUACGGCGACCACUACGGCAAGAAGAACACCGAGGAGAAGAUCUAC |
| | | CUGCCCCCCAUCCCCGCCGACGAGAUCCGGAACCCCGUGGUGCUGCGGGCCCUGUCCCAGGCCCGGAAGGUGAUCAACGGCGUGGUGCGGC |
| | | GGUACGGCUCCCCCGCCCGGAUCCACAUCGAGACCGCCCGGGAGGUGGGCAAGUCCUUCAAGGACCGGAAGGAGAUCGAGAAGCGGCAGGA |
| | | GGAGAACCGGAAGGACCGGGAGAAGGCCGCCGCCAAGUUCCGGGAGUACUUCCCCAACUUCGUGGGCGAGCCCAAGUCCAAGGACAUCCUG |
| | | AAGCUGCGGCUGUACGAGCAGCAGCACGGCAAGUGCCUGUACUCCGGCAAGGAGAUCAACCUGGUGCGGCUGAACGAGAAGGGCUACGUGG |
| | | AGAUCGACCACGCCCUGCCCUUCUCCCGGACCUGGGACGACUCCUUCAACAACAAGGUGCUGGUGCUGGGCUCCGAGAACCAGAACAAGGG |
| | | CAACCAGACCCCCUACGAGUACUUCAACGGCAAGGACAACUCCCGGGAGUGGCAGGAGUUCAAGGCCCGGGUGGAGACCUCCCGGUUCCCC |
| | | CGGUCCAAGAAGCAGCGGAUCCUGCUGCAGAAGUUCGACGAGGACGGCUUCAAGGAGUGCAACCUGAACGACACCCGGUACGUGAACCGGU |
| | | UCCUGUGCCAGUUCGUGGCCGACCACAUCCUGCUGACCGGCAAGGGCAAGCGGCGGGUGUUCGCCUCCAACGGCCAGAUCACCAACCUGCU |
| | | GCGGGGCUUCUGGGGCCUGCGGAAGGUGCGGGCCGAGAACGACCGGCACCACGCCCUGGACGCCGUGGUGGUGGCCUGCUCCACCGUGGCC |
| | | AUGCAGCAGAAGAUCACCCGGUUCGUGCGGUACAAGGAGAUGAACGCCUUCGACGGCAAGACCAUCGACAAGGAGACCGGCAAGGUGCUGC |
| | | ACCAGAAGACCCACUUCCCCCAGCCCUGGGAGUUCUUCGCCCAGGAGGUGAUGAUCCGGGUGUUCGGCAAGCCCGACGGCAAGCCCGAGUU |
| | | CGAGGAGGCCGACACCCCCGAGAAGCUGCGGACCCUGCUGGCCGAGAAGCUGUCCUCCCGGCCCGAGGCCGUGCACGAGUACGUGACCCCC |
| | | CUGUUCGUGUCCCGGGCCCCCAACCGGAAGAUGUCCGGCGCCCACAAGGACACCCUGCGGUCCGCCAAGCGGUUCGUGAAGCACAACGAGA |
| | | AGAUCUCCGUGAAGCGGGUGUGGCUGACCGAGAUCAAGCUGGCCGACCUGGAGAACAUGGUGAACUACAAGAACGGCCGGGAGAUCGAGCU |
| | | GUACGAGGCCCUGAAGGCCCGGCUGGAGGCCUACGGCGGCAACGCCAAGCAGGCCUUCGACCCCAAGGACAACCCCUUCUACAAGAAGGGC |
| | | GGCCAGCUGGUGAAGGCCGUGCGGGUGGAGAAGACCCAGGAGUCCGGCGUGCUGCUGAACAAGAAGAACGCCUACACCAUCGCCGACAACG |
| | | GCGACAUGGUGCGGGUGGACGUGUUCUGCAAGGUGGACAAGAAGGGCAAGAACCAGUACUUCAUCGUGCCCAUCUACGCCUGGCAGGUGGC |
| | | CGAGAACAUCCUGCCCGACAUCGACUGCAAGGGCUACCGGAUCGACGACUCCUACACCUUCUGCUUCUCCCUGCACAAGUACGACCUGAUC |
| | | GCCUUCCAGAAGGACGAGAAGUCCAAGGUGGAGUUCGCCUACUACAUCAACUGCGACUCCUCCAACGGCCGGUUCUACCUGGCCUGGCACG |
| | | ACAAGGGCUCCAAGGAGCAGCAGUUCCGGAUCUCCACCCAGAACCUGGUGCUGAUCCAGAAGUACCAGGUGAACGAGCUGGGCAAGGAGAU |
| | | CCGGCCCUGCCGGCUGAAGAAGCGGCCCCCCGUGCGGGGCGCCCCCGAGUCCGCCACCGAGUCCGGCGGCACCUCCACCGAGUCCGAGGGC |
| | | UCCGCCGGCACCUCCACCGAGUCCGAGGGCUCCGCCGGCUCCGCCGGCUCCACCUCCGGCGGCUCCGGCGGCGGCUCCGGCGGCUCCGGCU |
| | | CCGCCGGCACCUCCACCGAGUCCGAGGGCUCCGCCGGCACCUCCGAGUCCGCCACCGAGUCCGGCGGCACCUCCACCGAGUCCGAGGGCUC |
| | | CUCCUCCCGGGGCAAGUGCCUGUCCUACGAGACCGAGAUCCUGACCGUGGAGUACGGCCUGCUGCCCAUCGUGGUGGUGGUGGAGAAGCGG |
| | | AUCGAGUGCACCGUGUACUCCGUGGACAACAACGGCAACAUCUACACCCAGCCCGUGGCCCAGUGGCACGACCGGGGCGAGCAGGAGGUGU |
| | | UCGAGUACUGCCUGGAGGACGGCUCCCUGAUCCGGGCCACCAAGGACCACAAGUUCAUGACCGUGGACGGCCAGAUGCUGCCCAUCGACGA |
| | | GAUCUUCGAGCGGGAGCUGGACCUGAUGCGGGUGGACAACCUGCCCAACUAGCUAGCACCAGCCUCAAGAACACCCGAAUGGAGUCUCUAA |
| | | GCUACAUAAUACCAACUUACACUUUACAAAAUGUUGUCCCCCAAAAUGUAGCCAUUCGUAUCUGCUCCUAAUAAAAAGAAAGUUUCUUCAC |
| | | AUUCUCUCGAGAAAAAAAAAAAAUGGAAAAAAAAAAAACGGAAAAAAAAAAAAGGUAAAAAAAAAAAAUAUAAAAAAAAAAAACAUAAAAA |
| | | AAAAAAACGAAAAAAAAAAAACGUAAAAAAAAAAAACUCAAAAAAAAAAAGAUAAAAAAAAAAAACCUAAAAAAAAAAAAUGUAAAAAAAA |
| | | AAAAGGGAAAAAAAAAAAACGCAAAAAAAAAAAACACAAAAAAAAAAAAUGCAAAAAAAAAAAAUCGAAAAAAAAAAAAUCUAAAAAAAAA |
| | | AAACGAAAAAAAAAAAACCCAAAAAAAAAAAAGACAAAAAAAAAAAAUAGAAAAAAAAAAAGUUAAAAAAAAAAAACUGAAAAAAAAAAAA |
| | | UUUAAAAAAAAAAAAUCUAG |
| 24 | Nme2Cas9 | augGACGGCUCCGGCGGCGGCUCCCCCAAGAAGAAGCGGAAGGUGGAGGACAAGCGGCCCGCCGCCACCAAGAAGGCCGGCCAGGCCAAGA |
| | Intein | AGAAGAAGGGCGGCUCCGGCGGCGGCgccgccuucaagcccaaccccaucaacuacauccugggccuggacaucggcaucgccuccguggg |
| | (mRNA G)- | cugggccaugguggagaucgacgaggaggagaaccccauccggcugaucgaccugggcgugcgcgguguucgaggggccgaggugcccaag |
| | ORF | accggcgacucccuggccauggcccggcggcuggcccgguccguggcgggccugacccggcggcgcggcccaccggcugcuggggcccggc |
| | sequence | ggcugcugaagcgggagggcgugcugcaggccgccgacuucgacgagaacggccugaucaagucccugcccaacacccccuggcagcugcg |
| | | ggccgccgcccuggaccggaagcugaccccccuggagugguccgccgugcugcugcaccugaucaagcaccggggcuaccugucccagcgg |
| | | aagaacgagggcgagaccgccgacaaggagcugggcgcccugcugaagggcguggccaacaacgcccacgcccugcagaccggcgacuucc |
| | | ggacccccgccgagcuggcccugaacaaguucgagaaggaguccggccacauccggaaccagcggggcgacuacucccacaccuucucccg |
| | | gaaggaccugcaggccgagcugauccugcuguucgagaagcagaaggaguucggcaacccccacguguccggcggccugaaggagggcauc |
| | | gagacccugcugaugacccagcggcccgcccuguccggcgacgccgugcagaagaugcugggccacugcaccuucgagcccgccgagccca |
| | | aggccgccaagaacaccuacaccgccgagcgguucaucuggcugaccaagcugaacaaccugcggauccuggagcagggcuccgagcggcc |
| | | ccugaccgacaccgagcgggccacccugauggacgagcccuaccggaaguccaagcugaccuacgcccaggcccggaagcugcugggccug |
| | | gaggacaccgccuucuucaagggccugcgguacggcaaggacaacgccgaggccuccacccugauggagaugaaggccuaccacgccaucu |
| | | cccgggcccuggagaaggagggccugaaggacaagaaguccccccugaaccuguccuccgagcugcaggacgagaucggcaccgccuucuc |
| | | ccuguucaagaccgacgaggacaucaccggccggcugaaggaccgggugcagcccgagauccuggaggcccugcugaagcacaucuccuuc |
| | | gacaaguucgugcagaucucccugaaggcccugcggcggaucgugccccugauggagcagggcaagcgguacgacgaggccugcgccgaga |
| | | ucuacggcgaccacuacggcaagaagaacaccgaggagaagaucuaccugccccccauccccgccgacgagauccggaaccccguggugcu |
| | | gcgggcccugucccaggcccggaaggugaucaacggcguggugcggcgguacggcucccccgcccggauccacaucgagaccgcccgggag |
| | | gugggcaaguccuucaaggaccggaaggagaucgagaagcggcaggaggagaaccggaaggaccgggagaaggccgccgccaaguuccggg |
| | | aguacuuccccaacuucgugggcgagcccaaguccaaggacauccugaagcugcggcuguacgagcagcagcacggcaagugccuguacuc |
| | | cggcaaggagaucaaccuggugcggcugaacgagaagggcuacguggagaucgaccacgcccugcccuucucccggaccugggacgacucc |
| | | uucaacaacaaggugcuggugcugggcuccgagaaccagaacaagggcaaccagacccccuacgaguacuucaacggcaaggacaacuccc |
| | | gggaguggcaggaguucaaggcccggguggagaccucccgguucccccgguccaagaagcagcggauccugcugcagaaguucgacgagga |
| | | cggcuucaaggagugcaaccugaacgacacccgguacgugaaccgguuccugugccaguucguggccgaccacauccugcugaccggcaag |
| | | ggcaagcggcggguguucgccuccaacggccagaucaccaaccugcugcggggcuucuggggccugcggaaggugcgggccgagaacgacc |
| | | ggcaccacgcccuggacgccguggugguggccugcuccaccguggccaugcagcagaagaucacccgguucgugcgguacaaggagaugaa |
| | | cgccuucgacggcaagaccaucgacaaggagaccggcaaggugcugcaccagaagacccacuucccccagcccugggaguucuucgcccag |
| | | gaggugaugauccggguguucggcaagcccgacggcaagcccgaguucgaggaggccgacacccccgagaagcugcggacccugcuggccg |
| | | agaagcuguccucccggcccgaggccgugcacgaguacgugaccccccuguucgugucccgggcccccaaccggaagauguccggcgccca |
| | | caaggacacccugcgguccgccaagcgguucgugaagcacaacgagaagaucuccgugaagcggguguggcugaccgagaucaagcuggcc |
| | | gaccuggagaacauggugaacuacaagaacggccgggagaucgagcuguacgaggcccugaaggcccggcuggaggccuacggcggcaacg |
| | | ccaagcaggccuucgaccccaaggacaaccccuucuacaagaagggcggccagcuggugaaggccgugcggguggagaagacccaggaguc |
| | | cggcgugcugcugaacaagaagaacgccuacaccaucgccgacaacggcgacauggugcggguggacguguucugcaagguggacaagaag |
| | | ggcaagaaccaguacuucaucgugcccaucuacgccuggcagguggccgagaacauccugcccgacaucgacugcaagggcuaccggaucg |
| | | acgacuccuacaccuucugcuucucccugcacaaguacgaccugaucgccuuccagaaggacgagaaguccaagguggaguucgccuacua |
| | | caucaacugcgacuccuccaacggccgguucuaccuggccuggcacgacaagggcuccaaggagcagcaguuccggaucuccacccagaac |
| | | cuggugcugauccagaaguaccaggugaacgagcugggcaaggagauccggcccugccggcugaagaagcggccccccgugcggGGCGCCC |
| | | CCGAGUCCGCCACCGAGUCCGGCGGCACCUCCACCGAGUCCGAGGGCUCCGCCGGCACCUCCACCGAGUCCGAGGGCUCCGCCGGCUCCGC |
| | | CGGCUCCACCUCCGGCGGCUCCGGCGGCGGCUCCGGCGGCUCCGGCUCCGCCGGCACCUCCACCGAGUCCGAGGGCUCCGCCGGCACCUCC |
| | | GAGUCCGCCACCGAGUCCGGCGGCACCUCCACCGAGUCCGAGGGCUCCUCCUCCCGGGGCAAGUGCCUGUCCUACGAGACCGAGAUCCUGA |
| | | CCGUGGAGUACGGCCUGCUGCCCAUCGUGGUGGUGGUGGAGAAGCGGAUCGAGUGCACCGUGUACUCCGUGGACAACAACGGCAACAUCUA |
| | | CACCCAGCCCGUGGCCCAGUGGCACGACCGGGGCGAGCAGGAGGUGUUCGAGUACUGCCUGGAGGACGGCUCCCUGAUCCGGGCCACCAAG |
| | | GACCACAAGUUCAUGACCGUGGACGGCCAGAUGCUGCCCAUCGACGAGAUCUUCGAGCGGGAGCUGGACCUGAUGCGGGUGGACAACCUGC |
| | | CCAACuag |
| 25 | Nme2Cas9 | MDGSGGGSPKKKRKVEDKRPAATKKAGQAKKKKGGSGGGAAFKPNPINYILGLDIGIASVGWAMVEIDEEENPIRLIDLGVRVFERAEVPK |
| | Intein | TGDSLAMARRLARSVRRLTRRRAHRLLRARRLLKREGVLQAADFDENGLIKSLPNTPWQLRAAALDRKLTPLEWSAVLLHLIKHRGYLSQR |
| | (mRNA G)- | KNEGETADKELGALLKGVANNAHALQTGDFRTPAELALNKFEKESGHIRNQRGDYSHTFSRKDLQAELILLFEKQKEFGNPHVSGGLKEGI |
| | amino | ETLLMTQRPALSGDAVQKMLGHCTFEPAEPKAAKNTYTAERFIWLTKLNNLRILEQGSERPLTDTERATLMDEPYRKSKLTYAQARKLLGL |
| | acid | EDTAFFKGLRYGKDNAEASTLMEMKAYHAISRALEKEGLKDKKSPLNLSSELQDEIGTAFSLFKTDEDITGRLKDRVQPEILEALLKHISF |
| | sequence | DKFVQISLKALRRIVPLMEQGKRYDEACAEIYGDHYGKKNTEEKIYLPPIPADEIRNPVVLRALSQARKVINGVVRRYGSPARIHIETARE |
| | | VGKSFKDRKEIEKRQEENRKDREKAAAKFREYFPNFVGEPKSKDILKLRLYEQQHGKCLYSGKEINLVRLNEKGYVEIDHALPFSRTWDDS |
| | | FNNKVLVLGSENQNKGNQTPYEYFNGKDNSREWQEFKARVETSRFPRSKKQRILLQKFDEDGFKECNLNDTRYVNRFLCQFVADHILLTGK |
| | | GKRRVFASNGQITNLLRGFWGLRKVRAENDRHHALDAVVVACSTVAMQQKITRFVRYKEMNAFDGKTIDKETGKVLHQKTHFPQPWEFFAQ |
| | | EVMIRVFGKPDGKPEFEEADTPEKLRTLLAEKLSSRPEAVHEYVTPLFVSRAPNRKMSGAHKDTLRSAKRFVKHNEKISVKRVWLTEIKLA |
| | | DLENMVNYKNGREIELYEALKARLEAYGGNAKQAFDPKDNPFYKKGGQLVKAVRVEKTQESGVLLNKKNAYTIADNGDMVRVDVFCKVDKK |
| | | GKNQYFIVPIYAWQVAENILPDIDCKGYRIDDSYTFCFSLHKYDLIAFQKDEKSKVEFAYYINCDSSNGRFYLAWHDKGSKEQQFRISTQN |
| | | LVLIQKYQVNELGKEIRPCRLKKRPPVRGAPESATESGGTSTESEGSAGTSTESEGSAGSAGSTSGGSGGGSGGSGSAGTSTESEGSAGTS |
| | | ESATESGGTSTESEGSSSRGKCLSYETEILTVEYGLLPIVVVVEKRIECTVYSVDNNGNIYTQPVAQWHDRGEQEVFEYCLEDGSLIRATK |
| | | DHKFMTVDGQMLPIDEIFERELDLMRVDNLPN* |
| 26 | Spy- | GGGAAGCUCAGAAUAAACGCUCAACUUUGGCCGGAUCUGCCACCAUGAUCAAGAUCGCCACCCGGAAGUACCUGGGCAAGCAGAACGUGUA |
| | R1333K | CGACAUCGGCGUGGAGCGGGACCACAACUUCGCCCUGAAGAACGGCUUCAUCGCCUCCAACUGCUGGGAGGGCUCCGGCGACAAGAAGUAC |
| | Cas9 | UCCAUCGGCCUGGACAUCGGCACCAACUCCGUGGGCUGGGCCGUGAUCACCGACGAGUACAAGGUGCCCUCCAAGAAGUUCAAGGUGCUGG |
| | Intein | GCAACACCGACCGGCACUCCAUCAAGAAGAACCUGAUCGGCGCCCUGCUGUUCGACUCCGGCGAGACCGCCGAGGCCACCCGGCUGAAGCG |
| | (mRNA H)- | GACCGCCCGGCGGCGGUACACCCGGCGGAAGAACCGGAUCUGCUACCUGCAGGAGAUCUUCUCCAACGAGAUGGCCAAGGUGGACGACUCC |
| | mRNA | UUCUUCCACCGGCUGGAGGAGUCCUUCCUGGUGGAGGAGGACAAGAAGCACGAGCGGCACCCCAUCUUCGGCAACAUCGUGGACGAGGUGG |
| | sequence | CCUACCACGAGAAGUACCCCACCAUCUACCACCUGCGGAAGAAGCUGGUGGACUCCACCGACAAGGCCGACCUGCGGCUGAUCUACCUGGC |
| | | CCUGGCCCACAUGAUCAAGUUCCGGGGCCACUUCCUGAUCGAGGGCGACCUGAACCCCGACAACUCCGACGUGGACAAGCUGUUCAUCCAG |
| | | CUGGUGCAGACCUACAACCAGCUGUUCGAGGAGAACCCCAUCAACGCCUCCGGCGUGGACGCCAAGGCCAUCCUGUCCGCCCGGCUGUCCA |
| | | AGUCCCGGCGGCUGGAGAACCUGAUCGCCCAGCUGCCCGGCGAGAAGAAGAACGGCCUGUUCGGCAACCUGAUCGCCCUGUCCCUGGGCCU |
| | | GACCCCCAACUUCAAGUCCAACUUCGACCUGGCCGAGGACGCCAAGCUGCAGCUGUCCAAGGACACCUACGACGACGACCUGGACAACCUG |
| | | CUGGCCCAGAUCGGCGACCAGUACGCCGACCUGUUCCUGGCCGCCAAGAACCUGUCCGACGCCAUCCUGCUGUCCGACAUCCUGCGGGUGA |
| | | ACACCGAGAUCACCAAGGCCCCCCUGUCCGCCUCCAUGAUCAAGCGGUACGACGAGCACCACCAGGACCUGACCCUGCUGAAGGCCCUGGU |
| | | GCGGCAGCAGCUGCCCGAGAAGUACAAGGAGAUCUUCUUCGACCAGUCCAAGAACGGCUACGCCGGCUACAUCGACGGCGGCGCCUCCCAG |
| | | GAGGAGUUCUACAAGUUCAUCAAGCCCAUCCUGGAGAAGAUGGACGGCACCGAGGAGCUGCUGGUGAAGCUGAACCGGGAGGACCUGCUGC |
| | | GGAAGCAGCGGACCUUCGACAACGGCUCCAUCCCCCACCAGAUCCACCUGGGCGAGCUGCACGCCAUCCUGCGGCGGCAGGAGGACUUCUA |
| | | CCCCUUCCUGAAGGACAACCGGGAGAAGAUCGAGAAGAUCCUGACCUUCCGGAUCCCCUACUACGUGGGCCCCCUGGCCCGGGGCAACUCC |
| | | CGGUUCGCCUGGAUGACCCGGAAGUCCGAGGAGACCAUCACCCCCUGGAACUUCGAGGAGGUGGUGGACAAGGGCGCCUCCGCCCAGUCCU |
| | | UCAUCGAGCGGAUGACCAACUUCGACAAGAACCUGCCCAACGAGAAGGUGCUGCCCAAGCACUCCCUGCUGUACGAGUACUUCACCGUGUA |
| | | CAACGAGCUGACCAAGGUGAAGUACGUGACCGAGGGCAUGCGGAAGCCCGCCUUCCUGUCCGGCGAGCAGAAGAAGGCCAUCGUGGACCUG |
| | | CUGUUCAAGACCAACCGGAAGGUGACCGUGAAGCAGCUGAAGGAGGACUACUUCAAGAAGAUCGAGUGCUUCGACUCCGUGGAGAUCUCCG |
| | | GCGUGGAGGACCGGUUCAACGCCUCCCUGGGCACCUACCACGACCUGCUGAAGAUCAUCAAGGACAAGGACUUCCUGGACAACGAGGAGAA |
| | | CGAGGACAUCCUGGAGGACAUCGUGCUGACCCUGACCCUGUUCGAGGACCGGGAGAUGAUCGAGGAGCGGCUGAAGACCUACGCCCACCUG |
| | | UUCGACGACAAGGUGAUGAAGCAGCUGAAGCGGCGGCGGUACACCGGCUGGGGCCGGCUGUCCCGGAAGCUGAUCAACGGCAUCCGGGACA |
| | | AGCAGUCCGGCAAGACCAUCCUGGACUUCCUGAAGUCCGACGGCUUCGCCAACCGGAACUUCAUGCAGCUGAUCCACGACGACUCCCUGAC |
| | | CUUCAAGGAGGACAUCCAGAAGGCCCAGGUGUCCGGCCAGGGCGACUCCCUGCACGAGCACAUCGCCAACCUGGCCGGCUCCCCCGCCAUC |
| | | AAGAAGGGCAUCCUGCAGACCGUGAAGGUGGUGGACGAGCUGGUGAAGGUGAUGGGCCGGCACAAGCCCGAGAACAUCGUGAUCGAGAUGG |
| | | CCCGGGAGAACCAGACCACCCAGAAGGGCCAGAAGAACUCCCGGGAGCGGAUGAAGCGGAUCGAGGAGGGCAUCAAGGAGCUGGGCUCCCA |
| | | GAUCCUGAAGGAGCACCCCGUGGAGAACACCCAGCUGCAGAACGAGAAGCUGUACCUGUACUACCUGCAGAACGGCCGGGACAUGUACGUG |
| | | GACCAGGAGCUGGACAUCAACCGGCUGUCCGACUACGACGUGGACCACAUCGUGCCCCAGUCCUUCCUGAAGGACGACUCCAUCGACAACA |
| | | AGGUGCUGACCCGGUCCGACAAGAACCGGGGCAAGUCCGACAACGUGCCCUCCGAGGAGGUGGUGAAGAAGAUGAAGAACUACUGGCGGCA |
| | | GCUGCUGAACGCCAAGCUGAUCACCCAGCGGAAGUUCGACAACCUGACCAAGGCCGAGCGGGGCGGCCUGUCCGAGCUGGACAAGGCCGGC |
| | | UUCAUCAAGCGGCAGCUGGUGGAGACCCGGCAGAUCACCAAGCACGUGGCCCAGAUCCUGGACUCCCGGAUGAACACCAAGUACGACGAGA |
| | | ACGACAAGCUGAUCCGGGAGGUGAAGGUGAUCACCCUGAAGUCCAAGCUGGUGUCCGACUUCCGGAAGGACUUCCAGUUCUACAAGGUGCG |
| | | GGAGAUCAACAACUACCACCACGCCCACGACGCCUACCUGAACGCCGUGGUGGGCACCGCCCUGAUCAAGAAGUACCCCAAGCUGGAGUCC |
| | | GAGUUCGUGUACGGCGACUACAAGGUGUACGACGUGCGGAAGAUGAUCGCCAAGUCCGAGCAGGAGAUCGGCAAGGCCACCGCCAAGUACU |
| | | UCUUCUACUCCAACAUCAUGAACUUCUUCAAGACCGAGAUCACCCUGGCCAACGGCGAGAUCCGGAAGCGGCCCCUGAUCGAGACCAACGG |
| | | CGAGACCGGCGAGAUCGUGUGGGACAAGGGCCGGGACUUCGCCACCGUGCGGAAGGUGCUGUCCAUGCCCCAGGUGAACAUCGUGAAGAAG |
| | | ACCGAGGUGCAGACCGGCGGCUUCUCCAAGGAGUCCAUCCUGCCCAAGCGGAACUCCGACAAGCUGAUCGCCCGGAAGAAGGACUGGGACC |
| | | CCAAGAAGUACGGCGGCUUCGACUCCCCCACCGUGGCCUACUCCGUGCUGGUGGUGGCCAAGGUGGAGAAGGGCAAGUCCAAGAAGCUGAA |
| | | GUCCGUGAAGGAGCUGCUGGGCAUCACCAUCAUGGAGCGGUCCUCCUUCGAGAAGAACCCCAUCGACUUCCUGGAGGCCAAGGGCUACAAG |
| | | GAGGUGAAGAAGGACCUGAUCAUCAAGCUGCCCAAGUACUCCCUGUUCGAGCUGGAGAACGGCCGGAAGCGGAUGCUGGCCUCCGCCGGCG |
| | | AGCUGCAGAAGGGCAACGAGCUGGCCCUGCCCUCCAAGUACGUGAACUUCCUGUACCUGGCCUCCCACUACGAGAAGCUGAAGGGCUCCCC |
| | | CGAGGACAACGAGCAGAAGCAGCUGUUCGUGGAGCAGCACAAGCACUACCUGGACGAGAUCAUCGAGCAGAUCUCCGAGUUCUCCAAGCGG |
| | | GUGAUCCUGGCCGACGCCAACCUGGACAAGGUGCUGUCCGCCUACAACAAGCACCGGGACAAGCCCAUCCGGGAGCAGGCCGAGAACAUCA |
| | | UCCACCUGUUCACCCUGACCAACCUGGGCGCCCCCGCCGCCUUCAAGUACUUCGACACCACCAUCGACAAGAAGCGGUACACCUCCACCAA |
| | | GGAGGUGCUGGACGCCACCCUGAUCCACCAGUCCAUCACCGGCCUGUACGAGACCCGGAUCGACCUGUCCCAGCUGGGCGGCGACGGCGGC |
| | | GGCUCCCCCAAGAAGAAGCGGAAGGUGGAGUAGCUAGCACCAGCCUCAAGAACACCCGAAUGGAGUCUCUAAGCUACAUAAUACCAACUUA |
| | | CACUUUACAAAAUGUUGUCCCCCAAAAUGUAGCCAUUCGUAUCUGCUCCUAAUAAAAAGAAAGUUUCUUCACAUUCUCUCGAGAAAAAAAA |
| | | AAAAUGGAAAAAAAAAAAACGGAAAAAAAAAAAAGGUAAAAAAAAAAAAUAUAAAAAAAAAAAACAUAAAAAAAAAAAACGAAAAAAAAAA |
| | | AACGUAAAAAAAAAAAACUCAAAAAAAAAAAGAUAAAAAAAAAAAACCUAAAAAAAAAAAAUGUAAAAAAAAAAAAGGGAAAAAAAAAAAA |
| | | CGCAAAAAAAAAAAACACAAAAAAAAAAAAUGCAAAAAAAAAAAAUCGAAAAAAAAAAAAUCUAAAAAAAAAAAACGAAAAAAAAAAAACC |
| | | CAAAAAAAAAAAAGACAAAAAAAAAAAAUAGAAAAAAAAAAAGUUAAAAAAAAAAAACUGAAAAAAAAAAAAUUUAAAAAAAAAAAAUCUA |
| | | G |
| 27 | Spy- | augAUCAAGAUCGCCACCCGGAAGUACCUGGGCAAGCAGAACGUGUACGACAUCGGCGUGGAGCGGgaccacaacUUCGCCCUGAAGAACG |
| | R1333K | GCUUCAUCGCCUCCAACUGCUGGGAGGGCUCCGGCgacaagaaguacuccaucggccuggacaucggcaccaacuccgugggcugggccgu |
| | Cas9 | gaucaccgacgaguacaaggugcccuccaagaaguucaaggugcugggcaacaccgaccggcacuccaucaagaagaaccugaucggcgcc |
| | Intein | cugcuguucgacuccggcgagaccgccgaggccacccggcugaagcggaccgcccggcggcgguacacccggcggaagaaccggaucugcu |
| | (mRNA H)- | accugcaggagaucuucuccaacgagauggccaagguggacgacuccuucuuccaccggcuggaggaguccuuccugguggaggaggacaa |
| | ORF | gaagcacgagcggcaccccaucuucggcaacaucguggacgagguggccuaccacgagaaguaccccaccaucuaccaccugcggaagaag |
| | sequence | cugguggacuccaccgacaaggccgaccugcggcugaucuaccuggcccuggcccacaugaucaaguuccggggccacuuccugaucgagg |
| | | gcgaccugaaccccgacaacuccgacguggacaagcuguucauccagcuggugcagaccuacaaccagcuguucgaggagaaccccaucaa |
| | | cgccuccggcguggacgccaaggccauccuguccgcccggcuguccaagucccggcggcuggagaaccugaucgcccagcugcccggcgag |
| | | aagaagaacggccuguucggcaaccugaucgcccugucccugggccugacccccaacuucaaguccaacuucgaccuggccgaggacgcca |
| | | agcugcagcuguccaaggacaccuacgacgacgaccuggacaaccugcuggcccagaucggcgaccaguacgccgaccuguuccuggccgc |
| | | caagaaccuguccgacgccauccugcuguccgacauccugcgggugaacaccgagaucaccaaggccccccuguccgccuccaugaucaag |
| | | cgguacgacgagcaccaccaggaccugacccugcugaaggcccuggugcggcagcagcugcccgagaaguacaaggagaucuucuucgacc |
| | | aguccaagaacggcuacgccggcuacaucgacggcggcgccucccaggaggaguucuacaaguucaucaagcccauccuggagaagaugga |
| | | cggcaccgaggagcugcuggugaagcugaaccgggaggaccugcugcggaagcagcggaccuucgacaacggcuccaucccccaccagauc |
| | | caccugggcgagcugcacgccauccugcggcggcaggaggacuucuaccccuuccugaaggacaaccgggagaagaucgagaagauccuga |
| | | ccuuccggauccccuacuacgugggcccccuggcccggggcaacucccgguucgccuggaugacccggaaguccgaggagaccaucacccc |
| | | cuggaacuucgaggaggugguggacaagggcgccuccgcccaguccuucaucgagcggAUGACCAACUUCGACAAGAACCUGCCCAACGAG |
| | | AAGGUGCUGCCCAAGCACUCCCUGCUGUACGAGUACUUCACCGUGUACAACGAGCUGACCAAGGUGAAGUACGUGACCGAGGGCAUGCGGA |
| | | AGCCCGCCUUCCUGUCCGGCGAGCAGAAGAAGGCCAUCGUGGACCUGCUGUUCAAGACCAACCGGAAGGUGACCGUGAAGCAGCUGAAGGA |
| | | GGACUACUUCAAGAAGAUCGAGUGCUUCGACUCCGUGGAGAUCUCCGGCGUGGAGGACCGGUUCAACGCCUCCCUGGGCACCUACCACGAC |
| | | CUGCUGAAGAUCAUCAAGGACAAGGACUUCCUGGACAACGAGGAGAACGAGGACAUCCUGGAGGACAUCGUGCUGACCCUGACCCUGUUCG |
| | | AGGACCGGGAGAUGAUCGAGGAGCGGCUGAAGACCUACGCCCACCUGUUCGACGACAAGGUGAUGAAGCAGCUGAAGCGGCGGCGGUACAC |
| | | CGGCUGGGGCCGgcugucccggaagcugaucaacggcauccgggacaagcaguccggcaagaccauccuggacuuccugaaguccgacggc |
| | | uucgccaaccggaacuucaugcagcugauccacgacgacucccugaccuucaaggaggacauccagaaggcccagguguccggccagggcg |
| | | acucccugcacgagcacaucgccaaccuggccggcucccccgccaucaagaagggcauccugcagaccgugaaggugguggacgagcuggu |
| | | gaaggugaugggccggcacaagcccgagaacaucgugaucgagauggcccgggagaaccagaccacccagaagggccagaagaacucccgg |
| | | gagcggaugaagcggaucgaggagggcaucaaggagcugggcucccagauccugaaggagcaccccguggagaacacccagcugcagaacg |
| | | agaagcuguaccuguacuaccugcagaacggccgggacauguacguggaccaggagcuggacaucaaccggcuguccgacuacgacgugga |
| | | ccacaucgugccccaguccuuccugaaggacgacuccaucgacaacaaggugcugacccgguccgacaagaaccggggcaaguccgacaac |
| | | gugcccuccgaggagguggugaagaagaugaagaacuacuggcggcagcugcugaacgccaagcugaucacccagcggaaguucgacaacc |
| | | ugaccaaggccgagcggggcggccuguccgagcuggacaaggccggcuucaucaagcggcagcugguggagacccggcagaucaccaagca |
| | | cguggcccagauccuggacucccggaugaacaccaaguacgacgagaacgacaagcugauccgggaggugaaggugaucacccugaagucc |
| | | aagcugguguccgacuuccggaaggacuuccaguucuacaagguggcggagaucaacaacuaccaccacgcccacgacgccuaccugaacg |
| | | ccguggugggcaccgcccugaucaagaaguaccccaagcuggaguccgaguucguguacggcgacuacaagguguacgacgugcggaagau |
| | | gaucgccaaguccgagcaggagaucggcaaggccaccgccaaguacuucuucuacuccaacaucaugaacuucuucaagaccgagaucacc |
| | | cuggccaacggcgagauccggaagcggccccugaucgagaccaacggcgagaccggcgagaucgugugggacaagggccgggacuucgcca |
| | | ccgugcggaaggugcuguccaugccccaggugaacaucgugaagaagaccgaggugcagaccgcgggcuucuccaaggaguccauccugcc |
| | | caagcggaacuccgacaagcugaucgcccggaagaaggacugggaccccaagaaguacggcggcuucgacucccccaccguggccuacucc |
| | | gugcuggugguggccaagguggagaagggcaaguccaagaagcugaaguccgugaaggagcugcugggcaucaccaucauggagcgguccu |
| | | ccuucgagaagaaccccaucgacuuccuggaggccaagggcuacaaggaggugaagaaggaccugaucaucaagcugcccaaguacucccu |
| | | guucgagcuggagaacggccggaagcggaugcuggccuccgccggcgagcugcagaagggcaacgagcuggcccugcccuccaaguacgug |
| | | aacuuccuguaccuggccucccacuacgagaagcugaagggcucccccgaggacaacgagcagaagcagcuguucguggagcagcacaagc |
| | | acuaccuggacgagaucaucgagcagaucuccgaguucuccaagcgggugauccuggccgacgccaaccuggacaaggugcuguccgccua |
| | | caacaagcaccgggacaagcccauccgggagcaggccgagaacaucauccaccuguucacccugaccaaccugcgggcccccgccgccuuc |
| | | aaguacuucgacaccaccaucgacAAGaagcgguacaccuccaccaaggaggugcuggacgccacccugauccaccaguccaucaccggcc |
| | | uguacgagacccggaucgaccugucccagcugggggcgacGGCGGCGGCUCCCCCAAGAAGAAGCGGAAGGUGGAGuag |
| 28 | Spy- | MIKIATRKYLGKQNVYDIGVERDHNFALKNGFIASNCWEGSGDKKYSIGLDIGTNSVGWAVITDEYKVPSKKFKVLGNTDRHSIKKNLIGA |
| | R1333K | LLFDSGETAEATRLKRTARRRYTRRKNRICYLQEIFSNEMAKVDDSFFHRLEESFLVEEDKKHERHPIFGNIVDEVAYHEKYPTIYHLRKK |
| | Cas9 | LVDSTDKADLRLIYLALAHMIKFRGHFLIEGDLNPDNSDVDKLFIQLVQTYNQLFEENPINASGVDAKAILSARLSKSRRLENLIAQLPGE |
| | Intein | KKNGLFGNLIALSLGLTPNFKSNFDLAEDAKLQLSKDTYDDDLDNLLAQIGDQYADLFLAAKNLSDAILLSDILRVNTEITKAPLSASMIK |
| | (mRNA H)- | RYDEHHQDLTLLKALVRQQLPEKYKEIFFDQSKNGYAGYIDGGASQEEFYKFIKPILEKMDGTEELLVKLNREDLLRKQRTFDNGSIPHQI |
| | amino | HLGELHAILRRQEDFYPFLKDNREKIEKILTFRIPYYVGPLARGNSRFAWMTRKSEETITPWNFEEVVDKGASAQSFIERMTNFDKNLPNE |
| | acid | KVLPKHSLLYEYFTVYNELTKVKYVTEGMRKPAFLSGEQKKAIVDLLFKTNRKVTVKQLKEDYFKKIECFDSVEISGVEDRFNASLGTYHD |
| | sequence | LLKIIKDKDFLDNEENEDILEDIVLTLTLFEDREMIEERLKTYAHLFDDKVMKQLKRRRYTGWGRLSRKLINGIRDKQSGKTILDFLKSDG |
| | | FANRNFMQLIHDDSLTFKEDIQKAQVSGQGDSLHEHIANLAGSPAIKKGILQTVKVVDELVKVMGRHKPENIVIEMARENQTTQKGQKNSR |
| | | ERMKRIEEGIKELGSQILKEHPVENTQLQNEKLYLYYLQNGRDMYVDQELDINRLSDYDVDHIVPQSFLKDDSIDNKVLTRSDKNRGKSDN |
| | | VPSEEVVKKMKNYWRQLLNAKLITQRKFDNLTKAERGGLSELDKAGFIKRQLVETRQITKHVAQILDSRMNTKYDENDKLIREVKVITLKS |
| | | KLVSDFRKDFQFYKVREINNYHHAHDAYLNAVVGTALIKKYPKLESEFVYGDYKVYDVRKMIAKSEQEIGKATAKYFFYSNIMNFFKTEIT |
| | | LANGEIRKRPLIETNGETGEIVWDKGRDFATVRKVLSMPQVNIVKKTEVQTGGFSKESILPKRNSDKLIARKKDWDPKKYGGFDSPTVAYS |
| | | VLVVAKVEKGKSKKLKSVKELLGITIMERSSFEKNPIDFLEAKGYKEVKKDLIIKLPKYSLFELENGRKRMLASAGELQKGNELALPSKYV |
| | | NFLYLASHYEKLKGSPEDNEQKQLFVEQHKHYLDEIIEQISEFSKRVILADANLDKVLSAYNKHRDKPIREQAENIIHLFTLTNLGAPAAF |
| | | KYFDTTIDKKRYTSTKEVLDATLIHQSITGLYETRIDLSQLGGDGGGSPKKKRKVE* |
| 29 | Spy- | GGGAAGCUCAGAAUAAACGCUCAACUUUGGCCGGAUCUGCCACCAUGGACGGCUCCGGGGGGGGCUCCCCCAAGAAGAAGCGGAAGGUGGG |
| | R1333K | CUCCGGCGACAAGAAGUACUCCAUCGGCCUGGACAUCGGCACCAACUCCGUGGGCUGGGCCGUGAUCACCGACGAGUACAAGGUGCCCUCC |
| | Cas9 | AAGAAGUUCAAGGUGCUGGGCAACACCGACCGGCACUCCAUCAAGAAGAACCUGAUCGGCGCCCUGCUGUUCGACUCCGGCGAGACCGCCG |
| | Intein | AGGCCACCCGGCUGAAGCGGACCGCCCGGCGGCGGUACACCCGGCGGAAGAACCGGAUCUGCUACCUGCAGGAGAUCUUCUCCAACGAGAU |
| | (mRNA I)- | GGCCAAGGUGGACGACUCCUUCUUCCACCGGCUGGAGGAGUCCUUCCUGGUGGAGGAGGACAAGAAGCACGAGCGGCACCCCAUCUUCGGC |
| | mRNA | AACAUCGUGGACGAGGUGGCCUACCACGAGAAGUACCCCACCAUCUACCACCUGCGGAAGAAGCUGGUGGACUCCACCGACAAGGCCGACC |
| | sequence | UGCGGCUGAUCUACCUGGCCCUGGCCCACAUGAUCAAGUUCCGGGGCCACUUCCUGAUCGAGGGCGACCUGAACCCCGACAACUCCGACGU |
| | | GGACAAGCUGUUCAUCCAGCUGGUGCAGACCUACAACCAGCUGUUCGAGGAGAACCCCAUCAACGCCUCCGGCGUGGACGCCAAGGCCAUC |
| | | CUGUCCGCCCGGCUGUCCAAGUCCCGGCGGCUGGAGAACCUGAUCGCCCAGCUGCCCGGCGAGAAGAAGAACGGCCUGUUCGGCAACCUGA |
| | | UCGCCCUGUCCCUGGGCCUGACCCCCAACUUCAAGUCCAACUUCGACCUGGCCGAGGACGCCAAGCUGCAGCUGUCCAAGGACACCUACGA |
| | | CGACGACCUGGACAACCUGCUGGCCCAGAUCGGCGACCAGUACGCCGACCUGUUCCUGGCCGCCAAGAACCUGUCCGACGCCAUCCUGCUG |
| | | UCCGACAUCCUGCGGGUGAACACCGAGAUCACCAAGGCCCCCCUGUCCGCCUCCAUGAUCAAGCGGUACGACGAGCACCACCAGGACCUGA |
| | | CCCUGCUGAAGGCCCUGGUGCGGCAGCAGCUGCCCGAGAAGUACAAGGAGAUCUUCUUCGACCAGUCCAAGAACGGCUACGCCGGCUACAU |
| | | CGACGGCGGCGCCUCCCAGGAGGAGUUCUACAAGUUCAUCAAGCCCAUCCUGGAGAAGAUGGACGGCACCGAGGAGCUGCUGGUGAAGCUG |
| | | AACCGGGAGGACCUGCUGCGGAAGCAGCGGACCUUCGACAACGGCUCCAUCCCCCACCAGAUCCACCUGGGCGAGCUGCACGCCAUCCUGC |
| | | GGCGGCAGGAGGACUUCUACCCCUUCCUGAAGGACAACCGGGAGAAGAUCGAGAAGAUCCUGACCUUCCGGAUCCCCUACUACGUGGGCCC |
| | | CCUGGCCCGGGGCAACUCCCGGUUCGCCUGGAUGACCCGGAAGUCCGAGGAGACCAUCACCCCCUGGAACUUCGAGGAGGUGGUGGACAAG |
| | | GGCGCCUCCGCCCAGUCCUUCAUCGAGCGGAUGACCAACUUCGACAAGAACCUGCCCAACGAGAAGGUGCUGCCCAAGCACUCCCUGCUGU |
| | | ACGAGUACUUCACCGUGUACAACGAGCUGACCAAGGUGAAGUACGUGACCGAGGGCAUGCGGAAGCCCGCCUUCCUGUCCGGCGAGCAGAA |
| | | GAAGGCCAUCGUGGACCUGCUGUUCAAGACCAACCGGAAGGUGACCGUGAAGCAGCUGAAGGAGGACUACUUCAAGAAGAUCGAGUGCUUC |
| | | GACUCCGUGGAGAUCUCCGGCGUGGAGGACCGGUUCAACGCCUCCCUGGGCACCUACCACGACCUGCUGAAGAUCAUCAAGGACAAGGACU |
| | | UCCUGGACAACGAGGAGAACGAGGACAUCCUGGAGGACAUCGUGCUGACCCUGACCCUGUUCGAGGACCGGGAGAUGAUCGAGGAGCGGCU |
| | | GAAGACCUACGCCCACCUGUUCGACGACAAGGUGAUGAAGCAGCUGAAGCGGCGGCGGUACACCGGCUGGGGCCGGCUGUCCCGGAAGCUG |
| | | AUCAACGGCAUCCGGGACAAGCAGUCCGGCAAGACCAUCCUGGACUUCCUGAAGUCCGACGGCUUCGCCAACCGGAACUUCAUGCAGCUGA |
| | | UCCACGACGACUCCCUGACCUUCAAGGAGGACAUCCAGAAGGCCCAGGUGUCCGGCCAGGGCGACUCCCUGCACGAGCACAUCGCCAACCU |
| | | GGCCGGCUCCCCCGCCAUCAAGAAGGGCAUCCUGCAGACCGUGAAGGUGGUGGACGAGCUGGUGAAGGUGAUGGGCCGGCACAAGCCCGAG |
| | | AACAUCGUGAUCGAGAUGGCCCGGGAGAACCAGACCACCCAGAAGGGCCAGAAGAACUCCCGGGAGCGGAUGAAGCGGAUCGAGGAGGGCA |
| | | UCAAGGAGCUGGGCUCCCAGAUCCUGAAGGAGCACCCCGUGGAGAACACCCAGCUGCAGAACGAGAAGCUGUACCUGUACUACCUGCAGAA |
| | | CGGCCGGGACAUGUACGUGGACCAGGAGCUGGACAUCAACCGGCUGUCCGACUACGACGUGGACCACAUCGUGCCCCAGUCCUUCCUGAAG |
| | | GACGACUCCAUCGACAACAAGGUGCUGACCCGGUCCGACAAGAACCGGGGCAAGUCCGACAACGUGCCCUCCGAGGAGGUGGUGAAGAAGA |
| | | UGAAGAACUACUGGCGGCAGCUGCUGAACGCCAAGCUGAUCACCCAGCGGAAGUUCGACAACCUGACCAAGGCCGAGCGGGGCGGCCUGUC |
| | | CGAGCUGGACAAGGCCGGCUUCAUCAAGCGGCAGCUGGUGGAGACCCGGCAGAUCACCAAGCACGUGGCCCAGAUCCUGGACUCCCGGAUG |
| | | AACACCAAGUACGACGAGAACGACAAGCUGAUCCGGGAGGUGAAGGUGAUCACCCUGAAGUCCAAGCUGGUGUCCGACUUCCGGAAGGACU |
| | | UCCAGUUCUACAAGGUGCGGGAGAUCAACAACUACCACCACGCCCACGACGCCUACCUGAACGCCGUGGUGGGCACCGCCCUGAUCAAGAA |
| | | GUACCCCAAGCUGGAGUCCGAGUUCGUGUACGGCGACUACAAGGUGUACGACGUGCGGAAGAUGAUCGCCAAGUCCGAGCAGGAGAUCGGC |
| | | AAGGCCACCGCCAAGUACUUCUUCUACUCCAACAUCAUGAACUUCUUCAAGACCGAGAUCACCCUGGCCAACGGCGAGAUCCGGAAGCGGC |
| | | CCCUGAUCGAGACCAACGGCGAGACCGGCGAGAUCGUGUGGGACAAGGGCCGGGACUUCGCCACCGUGCGGAAGGUGCUGUCCAUGCCCCA |
| | | GGUGAACAUCGUGAAGAAGACCGAGGUGCAGACCGGCGGCUUCUCCAAGGAGUCCAUCCUGCCCAAGCGGAACUCCGACAAGCUGAUCGCC |
| | | CGGAAGAAGGACUGGGACCCCAAGAAGUACGGCGGCUUCGACUCCCCCACCGUGGCCUACUCCGUGCUGGUGGUGGCCAAGGUGGAGAAGG |
| | | GCAAGUCCAAGAAGCUGAAGUCCGUGAAGGAGCUGCUGGGCAUCACCAUCAUGGAGCGGUCCUCCUUCGAGAAGAACCCCAUCGACUUCCU |
| | | GGAGGCCAAGGGCUACAAGGAGGUGAAGAAGGACCUGAUCAUCAAGCUGCCCAAGUACUCCCUGUUCGAGCUGGAGAACGGCCGGAAGCGG |
| | | AUGCUGGCCUCCGCCGGCGAGCUGCAGAAGGGCAACGAGCUGGCCCUGCCCUCCAAGUACGUGAACUUCCUGUACCUGGCCUCCCACUACG |
| | | AGAAGCUGAAGGGCUCCCCCGAGGACAACGAGCAGAAGCAGCUGUUCGUGGAGCAGCACAAGCACUACCUGGACGAGAUCAUCGAGCAGAU |
| | | CUCCGAGUUCUCCAAGCGGGUGAUCCUGGCCGACGCCAACCUGGACAAGGUGCUGUCCGCCUACAACAAGCACCGGGACAAGCCCAUCCGG |
| | | GAGCAGGCCGAGAACAUCAUCCACCUGUUCACCCUGACCAACCUGGGCGCCCCCGCCGCCUUCAAGUACUUCGACACCACCAUCGACAAGA |
| | | AGCGGUACACCUCCACCAAGGAGGUGCUGGACGCCACCCUGAUCCACCAGUCCAUCACCGGCCUGUACGAGACCCGGAUCGACCUGUCCCA |
| | | GCUGGGCGGCGACCGGGGCAAGUGCCUGUCCUACGAGACCGAGAUCCUGACCGUGGAGUACGGCCUGCUGCCCAUCGUGGUGGUGGUGGAG |
| | | AAGCGGAUCGAGUGCACCGUGUACUCCGUGGACAACAACGGCAACAUCUACACCCAGCCCGUGGCCCAGUGGCACGACCGGGGCGAGCAGG |
| | | AGGUGUUCGAGUACUGCCUGGAGGACGGCUCCCUGAUCCGGGCCACCAAGGACCACAAGUUCAUGACCGUGGACGGCCAGAUGCUGCCCAU |
| | | CGACGAGAUCUUCGAGCGGGAGCUGGACCUGAUGCGGGUGGACAACCUGCCCAACUAGCUAGCACCAGCCUCAAGAACACCCGAAUGGAGU |
| | | CUCUAAGCUACAUAAUACCAACUUACACUUUACAAAAUGUUGUCCCCCAAAAUGUAGCCAUUCGUAUCUGCUCCUAAUAAAAAGAAAGUUU |
| | | CUUCACAUUCUCUCGAGAAAAAAAAAAAAUGGAAAAAAAAAAAACGGAAAAAAAAAAAAGGUAAAAAAAAAAAAUAUAAAAAAAAAAAACA |
| | | UAAAAAAAAAAAACGAAAAAAAAAAAACGUAAAAAAAAAAAACUCAAAAAAAAAAAGAUAAAAAAAAAAAACCUAAAAAAAAAAAAUGUAA |
| | | AAAAAAAAAAGGGAAAAAAAAAAAACGCAAAAAAAAAAAACACAAAAAAAAAAAAUGCAAAAAAAAAAAAUCGAAAAAAAAAAAAUCUAAA |
| | | AAAAAAAAACGAAAAAAAAAAAACCCAAAAAAAAAAAAGACAAAAAAAAAAAAUAGAAAAAAAAAAAGUUAAAAAAAAAAAACUGAAAAAA |
| | | AAAAAAUUUAAAAAAAAAAAAUCUAG |
| 30 | Spy- | augGACGGCUCCGGCGGCGGCUCCCCCAAGAAGAAGCGGAAGGUGGGCUCCGGCgacaagaaguacuccaucggccuggacaucggcacca |
| | R1333K | acuccgugggcugggccgugaucaccgacgaguacaaggugcccuccaagaaguucaaggugcugggcaacaccgaccggcacuccaucaa |
| | Cas9 | gaagaaccugaucggcgcccugcuguucgacuccggcgagaccgccgaggccacccggcugaagcggaccgcccggcggcgguacacccgg |
| | Intein | cggaagaaccggaucugcuaccugcaggagaucuucuccaacgagauggccaagguggacgacuccuucuuccaccggcuggaggaguccu |
| | (mRNA I)- | uccugguggaggaggacaagaagcacgagcggcaccccaucuucggcaacaucguggacgagguggccuaccacgagaaguaccccaccau |
| | ORF | cuaccaccugcggaagaagcugguggacuccaccgacaaggccgaccugcggcugaucuaccuggcccuggcccacaugaucaaguuccgg |
| | sequence | ggccacuuccugaucgagggcgaccugaaccccgacaacuccgacguggacaagcuguucauccagcuggugcagaccuacaaccagcugu |
| | | ucgaggagaaccccaucaacgccuccggcguggacgccaaggccauccuguccgcccggcuguccaagucccggcggcuggagaaccugau |
| | | cgcccagcugcccggcgagaagaagaacggccuguucggcaaccugaucgcccugucccugggccugacccccaacuucaaguccaacuuc |
| | | gaccuggccgaggacgccaagcugcagcuguccaaggacaccuacgacgacgaccuggacaaccugcuggcccagaucggcgaccaguacg |
| | | ccgaccuguuccuggccgccaagaaccuguccgacgccauccugcuguccgacauccugcgggugaacaccgagaucaccaaggccccccu |
| | | guccgccuccaugaucaagcgguacgacgagcaccaccaggaccugacccugcugaaggcccuggugcggcagcagcugcccgagaaguac |
| | | aaggagaucuucuucgaccaguccaagaacggcuacgccggcuacaucgacgggcgcgccucccaggaggaguucuacaaguucaucaagc |
| | | ccauccuggagaagauggacggcaccgaggagcugcuggugaagcugaaccgggaggaccugcugcggaagcagcggaccuucgacaacgg |
| | | cuccaucccccaccagauccaccugggcgagcugcacgccauccugcggcggcaggaggacuucuaccccuuccugaaggacaaccgggag |
| | | aagaucgagaagauccugaccuuccggauccccuacuacgugggcccccuggcccggggcaacucccgguucgccuggaugacccggaagu |
| | | ccgaggagaccaucacccccuggaacuucgaggaggugguggacaagggcgccuccgcccaguccuucaucgagcggAUGACCAACUUCGA |
| | | CAAGAACCUGCCCAACGAGAAGGUGCUGCCCAAGCACUCCCUGCUGUACGAGUACUUCACCGUGUACAACGAGCUGACCAAGGUGAAGUAC |
| | | GUGACCGAGGGCAUGCGGAAGCCCGCCUUCCUGUCCGGCGAGCAGAAGAAGGCCAUCGUGGACCUGCUGUUCAAGACCAACCGGAAGGUGA |
| | | CCGUGAAGCAGCUGAAGGAGGACUACUUCAAGAAGAUCGAGUGCUUCGACUCCGUGGAGAUCUCCGGCGUGGAGGACCGGUUCAACGCCUC |
| | | CCUGGGCACCUACCACGACCUGCUGAAGAUCAUCAAGGACAAGGACUUCCUGGACAACGAGGAGAACGAGGACAUCCUGGAGGACAUCGUG |
| | | CUGACCCUGACCCUGUUCGAGGACCGGGAGAUGAUCGAGGAGCGGCUGAAGACCUACGCCCACCUGUUCGACGACAAGGUGAUGAAGCAGC |
| | | UGAAGCGGCGGCGGUACACCGGCUGGGGCCGgcugucccggaagcugaucaacggcauccgggacaagcaguccggcaagaccauccugga |
| | | cuuccugaaguccgacggcuucgccaaccggaacuucaugcagcugauccacgacgacucccugaccuucaaggaggacauccagaaggcc |
| | | cagguguccggccagggcgacucccugcacgagcacaucgccaaccuggccggcucccccgccaucaagaagggcauccugcagaccguga |
| | | aggugguggacgagcuggugaaggugaugggccggcacaagcccgagaacaucgugaucgagauggcccgggagaaccagaccacccagaa |
| | | gggccagaagaacucccgggagcggaugaagcggaucgaggagggcaucaaggagcugggcucccagauccugaaggagcaccccguggag |
| | | aacacccagcugcagaacgagaagcuguaccuguacuaccugcagaacggccgggacauguacguggaccaggagcuggacaucaaccggc |
| | | uguccgacuacgacguggaccacaucgugccccaguccuuccugaaggacgacuccaucgacaacaaggugcugacccgguccgacaagaa |
| | | ccggggcaaguccgacaacgugcccuccgaggagguggugaagaagaugaagaacuacuggcggcagcugcugaacgccaagcugaucacc |
| | | cagcggaaguucgacaaccugaccaaggccgagcgcgggggccuguccgagcuggacaaggccggcuucaucaagcggcagcugguggaga |
| | | cccggcagaucaccaagcacguggcccagauccuggacucccggaugaacaccaaguacgacgagaacgacaagcugauccgggaggugaa |
| | | ggugaucacccugaaguccaagcugguguccgacuuccggaaggacuuccaguucuacaagguggcggagaucaacaacuaccaccacgcc |
| | | cacgacgccuaccugaacgccguggugggcaccgcccugaucaagaaguaccccaagcuggaguccgaguucguguacggcgacuacaagg |
| | | uguacgacgugcggaagaugaucgccaaguccgagcaggagaucggcaaggccaccgccaaguacuucuucuacuccaacaucaugaacuu |
| | | cuucaagaccgagaucacccuggccaacggcgagauccggaagcggccccugaucgagaccaacggcgagaccggcgagaucgugugggac |
| | | aagggccgggacuucgccaccgugcggaaggugcuguccaugccccaggugaacaucgugaagaagaccgagcgugcagaccggggcuucu |
| | | ccaaggaguccauccugcccaagcggaacuccgacaagcugaucgcccggaagaaggacugggaccccaagaaguacggcggcuucgacuc |
| | | ccccaccguggccuacuccgugcuggugguggccaagguggagaagggcaaguccaagaagcugaaguccgugaaggagcugcugggcauc |
| | | accaucauggagcgguccuccuucgagaagaaccccaucgacuuccuggaggccaagggcuacaaggaggugaagaaggaccugaucauca |
| | | agcugcccaaguacucccuguucgagcuggagaacggccggaagcggaugcuggccuccgccggcgagcugcagaagggcaacgagcuggc |
| | | ccugcccuccaaguacgugaacuuccuguaccuggccucccacuacgagaagcugaagggcucccccgaggacaacgagcagaagcagcug |
| | | uucguggagcagcacaagcacuaccuggacgagaucaucgagcagaucuccgaguucuccaagcgggugauccuggccgacgccaaccugg |
| | | acaaggugcuguccgccuacaacaagcaccgggacaagcccauccgggagcaggccgagaacaucauccaccuguucacccugaccaaccu |
| | | gggcgcccccgccgccuucaaguacuucgacaccaccaucgacAAGaagcgguacaccuccaccaaggaggugcuggacgccacccugauc |
| | | caccaguccaucaccggccuguacgagacccggaucgaccugucccagcuggcgggcgacCGGGGCAAGUGCCUGUCCUACGAGACCGAGA |
| | | UCCUGACCGUGGAGUACGGCCUGCUGCCCAUCGUGGUGGUGGUGGAGAAGCGGAUCGAGUGCACCGUGUACUCCGUGGACAACAACGGCAA |
| | | CAUCUACACCCAGCCCGUGGCCCAGUGGCACGACCGGGGCGAGCAGGAGGUGUUCGAGUACUGCCUGGAGGACGGCUCCCUGAUCCGGGCC |
| | | ACCAAGGACCACAAGUUCAUGACCGUGGACGGCCAGAUGCUGCCCAUCGACGAGAUCUUCGAGCGGGAGCUGGACCUGAUGCGGGUGGACA |
| | | ACCUGCCCAACuag |
| 31 | Spy- | MDGSGGGSPKKKRKVGSGDKKYSIGLDIGTNSVGWAVITDEYKVPSKKFKVLGNTDRHSIKKNLIGALLFDSGETAEATRLKRTARRRYTR |
| | R1333K | RKNRICYLQEIFSNEMAKVDDSFFHRLEESFLVEEDKKHERHPIFGNIVDEVAYHEKYPTIYHLRKKLVDSTDKADLRLIYLALAHMIKFR |
| | Cas9 | GHFLIEGDLNPDNSDVDKLFIQLVQTYNQLFEENPINASGVDAKAILSARLSKSRRLENLIAQLPGEKKNGLFGNLIALSLGLTPNFKSNF |
| | Intein | DLAEDAKLQLSKDTYDDDLDNLLAQIGDQYADLFLAAKNLSDAILLSDILRVNTEITKAPLSASMIKRYDEHHQDLTLLKALVRQQLPEKY |
| | (mRNA I)- | KEIFFDQSKNGYAGYIDGGASQEEFYKFIKPILEKMDGTEELLVKLNREDLLRKQRTFDNGSIPHQIHLGELHAILRRQEDFYPFLKDNRE |
| | amino | KIEKILTFRIPYYVGPLARGNSRFAWMTRKSEETITPWNFEEVVDKGASAQSFIERMTNFDKNLPNEKVLPKHSLLYEYFTVYNELTKVKY |
| | acid | VTEGMRKPAFLSGEQKKAIVDLLFKTNRKVTVKQLKEDYFKKIECFDSVEISGVEDRFNASLGTYHDLLKIIKDKDFLDNEENEDILEDIV |
| | sequence | LTLTLFEDREMIEERLKTYAHLFDDKVMKQLKRRRYTGWGRLSRKLINGIRDKQSGKTILDFLKSDGFANRNFMQLIHDDSLTFKEDIQKA |
| | | QVSGQGDSLHEHIANLAGSPAIKKGILQTVKVVDELVKVMGRHKPENIVIEMARENQTTQKGQKNSRERMKRIEEGIKELGSQILKEHPVE |
| | | NTQLQNEKLYLYYLQNGRDMYVDQELDINRLSDYDVDHIVPQSFLKDDSIDNKVLTRSDKNRGKSDNVPSEEVVKKMKNYWRQLLNAKLIT |
| | | QRKFDNLTKAERGGLSELDKAGFIKRQLVETRQITKHVAQILDSRMNTKYDENDKLIREVKVITLKSKLVSDFRKDFQFYKVREINNYHHA |
| | | HDAYLNAVVGTALIKKYPKLESEFVYGDYKVYDVRKMIAKSEQEIGKATAKYFFYSNIMNFFKTEITLANGEIRKRPLIETNGETGEIVWD |
| | | KGRDFATVRKVLSMPQVNIVKKTEVQTGGFSKESILPKRNSDKLIARKKDWDPKKYGGFDSPTVAYSVLVVAKVEKGKSKKLKSVKELLGI |
| | | TIMERSSFEKNPIDFLEAKGYKEVKKDLIIKLPKYSLFELENGRKRMLASAGELQKGNELALPSKYVNFLYLASHYEKLKGSPEDNEQKQL |
| | | FVEQHKHYLDEIIEQISEFSKRVILADANLDKVLSAYNKHRDKPIREQAENIIHLFTLTNLGAPAAFKYFDTTIDKKRYTSTKEVLDATLI |
| | | HQSITGLYETRIDLSQLGGDRGKCLSYETEILTVEYGLLPIVVVVEKRIECTVYSVDNNGNIYTQPVAQWHDRGEQEVFEYCLEDGSLIRA |
| | | TKDHKFMTVDGQMLPIDEIFERELDLMRVDNLPN* |
| 32 | Nme2Cas9 | GGGAAGCUCAGAAUAAACGCUCAACUUUGGCCGGAUCUGCCACCAUGAUCAAGAUCGCCACCCGGAAGUACCUGGGCAAGCAGAACGUGUA |
| | Intein | CGACAUCGGCGUGGAGCGGGACCACAACUUCGCCCUGAAGAACGGCUUCAUCGCCUCCAACUGCUGGGAGGGCGCCCCCGAGUCCGCCACC |
| | (mRNA J)- | GAGUCCGGCGGCACCUCCACCGAGUCCGAGGGCUCCGCCGGCACCUCCACCGAGUCCGAGGGCUCCGCCGGCUCCGCCGGCUCCACCUCCG |
| | mRNA | GCGGCUCCGGCGGCGGCUCCGGCGGCUCCGGCUCCGCCGGCACCUCCACCGAGUCCGAGGGCUCCGCCGGCACCUCCGAGUCCGCCACCGA |
| | sequence | GUCCGGCGGCACCUCCACCGAGUCCGAGGGCUCCUCCUCCGGCGCCGCCUUCAAGCCCAACCCCAUCAACUACAUCCUGGGCCUGGACAUC |
| | | GGCAUCGCCUCCGUGGGCUGGGCCAUGGUGGAGAUCGACGAGGAGGAGAACCCCAUCCGGCUGAUCGACCUGGGCGUGCGGGUGUUCGAGC |
| | | GGGCCGAGGUGCCCAAGACCGGCGACUCCCUGGCCAUGGCCCGGCGGCUGGCCCGGUCCGUGCGGCGGCUGACCCGGCGGCGGGCCCACCG |
| | | GCUGCUGCGGGCCCGGCGGCUGCUGAAGCGGGAGGGCGUGCUGCAGGCCGCCGACUUCGACGAGAACGGCCUGAUCAAGUCCCUGCCCAAC |
| | | ACCCCCUGGCAGCUGCGGGCCGCCGCCCUGGACCGGAAGCUGACCCCCCUGGAGUGGUCCGCCGUGCUGCUGCACCUGAUCAAGCACCGGG |
| | | GCUACCUGUCCCAGCGGAAGAACGAGGGCGAGACCGCCGACAAGGAGCUGGGCGCCCUGCUGAAGGGCGUGGCCAACAACGCCCACGCCCU |
| | | GCAGACCGGCGACUUCCGGACCCCCGCCGAGCUGGCCCUGAACAAGUUCGAGAAGGAGUCCGGCCACAUCCGGAACCAGCGGGGCGACUAC |
| | | UCCCACACCUUCUCCCGGAAGGACCUGCAGGCCGAGCUGAUCCUGCUGUUCGAGAAGCAGAAGGAGUUCGGCAACCCCCACGUGUCCGGCG |
| | | GCCUGAAGGAGGGCAUCGAGACCCUGCUGAUGACCCAGCGGCCCGCCCUGUCCGGCGACGCCGUGCAGAAGAUGCUGGGCCACUGCACCUU |
| | | CGAGCCCGCCGAGCCCAAGGCCGCCAAGAACACCUACACCGCCGAGCGGUUCAUCUGGCUGACCAAGCUGAACAACCUGCGGAUCCUGGAG |
| | | CAGGGCUCCGAGCGGCCCCUGACCGACACCGAGCGGGCCACCCUGAUGGACGAGCCCUACCGGAAGUCCAAGCUGACCUACGCCCAGGCCC |
| | | GGAAGCUGCUGGGCCUGGAGGACACCGCCUUCUUCAAGGGCCUGCGGUACGGCAAGGACAACGCCGAGGCCUCCACCCUGAUGGAGAUGAA |
| | | GGCCUACCACGCCAUCUCCCGGGCCCUGGAGAAGGAGGGCCUGAAGGACAAGAAGUCCCCCCUGAACCUGUCCUCCGAGCUGCAGGACGAG |
| | | AUCGGCACCGCCUUCUCCCUGUUCAAGACCGACGAGGACAUCACCGGCCGGCUGAAGGACCGGGUGCAGCCCGAGAUCCUGGAGGCCCUGC |
| | | UGAAGCACAUCUCCUUCGACAAGUUCGUGCAGAUCUCCCUGAAGGCCCUGCGGCGGAUCGUGCCCCUGAUGGAGCAGGGCAAGCGGUACGA |
| | | CGAGGCCUGCGCCGAGAUCUACGGCGACCACUACGGCAAGAAGAACACCGAGGAGAAGAUCUACCUGCCCCCCAUCCCCGCCGACGAGAUC |
| | | CGGAACCCCGUGGUGCUGCGGGCCCUGUCCCAGGCCCGGAAGGUGAUCAACGGCGUGGUGCGGCGGUACGGCUCCCCCGCCCGGAUCCACA |
| | | UCGAGACCGCCCGGGAGGUGGGCAAGUCCUUCAAGGACCGGAAGGAGAUCGAGAAGCGGCAGGAGGAGAACCGGAAGGACCGGGAGAAGGC |
| | | CGCCGCCAAGUUCCGGGAGUACUUCCCCAACUUCGUGGGCGAGCCCAAGUCCAAGGACAUCCUGAAGCUGCGGCUGUACGAGCAGCAGCAC |
| | | GGCAAGUGCCUGUACUCCGGCAAGGAGAUCAACCUGGUGCGGCUGAACGAGAAGGGCUACGUGGAGAUCGACCACGCCCUGCCCUUCUCCC |
| | | GGACCUGGGACGACUCCUUCAACAACAAGGUGCUGGUGCUGGGCUCCGAGAACCAGAACAAGGGCAACCAGACCCCCUACGAGUACUUCAA |
| | | CGGCAAGGACAACUCCCGGGAGUGGCAGGAGUUCAAGGCCCGGGUGGAGACCUCCCGGUUCCCCCGGUCCAAGAAGCAGCGGAUCCUGCUG |
| | | CAGAAGUUCGACGAGGACGGCUUCAAGGAGUGCAACCUGAACGACACCCGGUACGUGAACCGGUUCCUGUGCCAGUUCGUGGCCGACCACA |
| | | UCCUGCUGACCGGCAAGGGCAAGCGGCGGGUGUUCGCCUCCAACGGCCAGAUCACCAACCUGCUGCGGGGCUUCUGGGGCCUGCGGAAGGU |
| | | GCGGGCCGAGAACGACCGGCACCACGCCCUGGACGCCGUGGUGGUGGCCUGCUCCACCGUGGCCAUGCAGCAGAAGAUCACCCGGUUCGUG |
| | | CGGUACAAGGAGAUGAACGCCUUCGACGGCAAGACCAUCGACAAGGAGACCGGCAAGGUGCUGCACCAGAAGACCCACUUCCCCCAGCCCU |
| | | GGGAGUUCUUCGCCCAGGAGGUGAUGAUCCGGGUGUUCGGCAAGCCCGACGGCAAGCCCGAGUUCGAGGAGGCCGACACCCCCGAGAAGCU |
| | | GCGGACCCUGCUGGCCGAGAAGCUGUCCUCCCGGCCCGAGGCCGUGCACGAGUACGUGACCCCCCUGUUCGUGUCCCGGGCCCCCAACCGG |
| | | AAGAUGUCCGGCGCCCACAAGGACACCCUGCGGUCCGCCAAGCGGUUCGUGAAGCACAACGAGAAGAUCUCCGUGAAGCGGGUGUGGCUGA |
| | | CCGAGAUCAAGCUGGCCGACCUGGAGAACAUGGUGAACUACAAGAACGGCCGGGAGAUCGAGCUGUACGAGGCCCUGAAGGCCCGGCUGGA |
| | | GGCCUACGGCGGCAACGCCAAGCAGGCCUUCGACCCCAAGGACAACCCCUUCUACAAGAAGGGCGGCCAGCUGGUGAAGGCCGUGCGGGUG |
| | | GAGAAGACCCAGGAGUCCGGCGUGCUGCUGAACAAGAAGAACGCCUACACCAUCGCCGACAACGGCGACAUGGUGCGGGUGGACGUGUUCU |
| | | GCAAGGUGGACAAGAAGGGCAAGAACCAGUACUUCAUCGUGCCCAUCUACGCCUGGCAGGUGGCCGAGAACAUCCUGCCCGACAUCGACUG |
| | | CAAGGGCUACCGGAUCGACGACUCCUACACCUUCUGCUUCUCCCUGCACAAGUACGACCUGAUCGCCUUCCAGAAGGACGAGAAGUCCAAG |
| | | GUGGAGUUCGCCUACUACAUCAACUGCGACUCCUCCAACGGCCGGUUCUACCUGGCCUGGCACGACAAGGGCUCCAAGGAGCAGCAGUUCC |
| | | GGAUCUCCACCCAGAACCUGGUGCUGAUCCAGAAGUACCAGGUGAACGAGCUGGGCAAGGAGAUCCGGCCCUGCCGGCUGAAGAAGCGGCC |
| | | CCCCGUGCGGUCCGGCAAGCGGACCGCCGACGGCUCCGGCGGCGGCUCCCCCAAGAAGAAGCGGAAGGUGGAGUAGCUAGCACCAGCCUCA |
| | | AGAACACCCGAAUGGAGUCUCUAAGCUACAUAAUACCAACUUACACUUUACAAAAUGUUGUCCCCCAAAAUGUAGCCAUUCGUAUCUGCUC |
| | | CUAAUAAAAAGAAAGUUUCUUCACAUUCUCUCGAGAAAAAAAAAAAAUGGAAAAAAAAAAAACGGAAAAAAAAAAAAGGUAAAAAAAAAAA |
| | | AUAUAAAAAAAAAAAACAUAAAAAAAAAAAACGAAAAAAAAAAAACGUAAAAAAAAAAAACUCAAAAAAAAAAAGAUAAAAAAAAAAAACC |
| | | UAAAAAAAAAAAAUGUAAAAAAAAAAAAGGGAAAAAAAAAAAACGCAAAAAAAAAAAACACAAAAAAAAAAAAUGCAAAAAAAAAAAAUCG |
| | | AAAAAAAAAAAAUCUAAAAAAAAAAAACGAAAAAAAAAAAACCCAAAAAAAAAAAAGACAAAAAAAAAAAAUAGAAAAAAAAAAAGUUAAA |
| | | AAAAAAAAACUGAAAAAAAAAAAAUUUAAAAAAAAAAAAUCUAG |
| 33 | Nme2Cas9 | AUGAUCAAGAUCGCCACCCGGAAGUACCUGGGCAAGCAGAACGUGUACGACAUCGGCGUGGAGCGGgaccacaacUUCGCCCUGAAGAACG |
| | Intein | GCUUCAUCGCCUCCAACUGCUGGGAGGGCGCCCCCGAGUCCGCCACCGAGUCCGGCGGCACCUCCACCGAGUCCGAGGGCUCCGCCGGCAC |
| | (mRNA J)- | CUCCACCGAGUCCGAGGGCUCCGCCGGCUCCGCCGGCUCCACCUCCGGCGGCUCCGGCGGCGGCUCCGGCGGCUCCGGCUCCGCCGGCACC |
| | ORF | UCCACCGAGUCCGAGGGCUCCGCCGGCACCUCCGAGUCCGCCACCGAGUCCGGCGGCACCUCCACCGAGUCCGAGGGCUCCUCCUCCGGCG |
| | sequence | CCGCCUUCAAGCCCAACCCCAUCAACUACAUCCUGGGCCUGGACAUCGGCAUCGCCUCCGUGGGCUGGGCCAUGGUGGAGAUCGACGAGGA |
| | | GGAGAACCCCAUCCGGCUGAUCGACCUGGGCGUGCGGGUGUUCGAGCGGGCCGAGGUGCCCAAGACCGGCGACUCCCUGGCCAUGGCCCGG |
| | | CGGCUGGCCCGGUCCGUGCGGCGGCUGACCCGGCGGCGGGCCCACCGGCUGCUGCGGGCCCGGCGGCUGCUGAAGCGGGAGGGCGUGCUGC |
| | | AGGCCGCCGACUUCGACGAGAACGGCCUGAUCAAGUCCCUGCCCAACACCCCCUGGCAGCUGCGGGCCGCCGCCCUGGACCGGAAGCUGAC |
| | | CCCCCUGGAGUGGUCCGCCGUGCUGCUGCACCUGAUCAAGCACCGGGGCUACCUGUCCCAGCGGAAGAACGAGGGCGAGACCGCCGACAAG |
| | | GAGCUGGGCGCCCUGCUGAAGGGCGUGGCCAACAACGCCCACGCCCUGCAGACCGGCGACUUCCGGACCCCCGCCGAGCUGGCCCUGAACA |
| | | AGUUCGAGAAGGAGUCCGGCCACAUCCGGAACCAGCGGGGCGACUACUCCCACACCUUCUCCCGGAAGGACCUGCAGGCCGAGCUGAUCCU |
| | | GCUGUUCGAGAAGCAGAAGGAGUUCGGCAACCCCCACGUGUCCGGCGGCCUGAAGGAGGGCAUCGAGACCCUGCUGAUGACCCAGCGGCCC |
| | | GCCCUGUCCGGCGACGCCGUGCAGAAGAUGCUGGGCCACUGCACCUUCGAGCCCGCCGAGCCCAAGGCCGCCAAGAACACCUACACCGCCG |
| | | AGCGGUUCAUCUGGCUGACCAAGCUGAACAACCUGCGGAUCCUGGAGCAGGGCUCCGAGCGGCCCCUGACCGACACCGAGCGGGCCACCCU |
| | | GAUGGACGAGCCCUACCGGAAGUCCAAGCUGACCUACGCCCAGGCCCGGAAGCUGCUGGGCCUGGAGGACACCGCCUUCUUCAAGGGCCUG |
| | | CGGUACGGCAAGGACAACGCCGAGGCCUCCACCCUGAUGGAGAUGAAGGCCUACCACGCCAUCUCCCGGGCCCUGGAGAAGGAGGGCCUGA |
| | | AGGACAAGAAGUCCCCCCUGAACCUGUCCUCCGAGCUGCAGGACGAGAUCGGCACCGCCUUCUCCCUGUUCAAGACCGACGAGGACAUCAC |
| | | CGGCCGGCUGAAGGACCGGGUGCAGCCCGAGAUCCUGGAGGCCCUGCUGAAGCACAUCUCCUUCGACAAGUUCGUGCAGAUCUCCCUGAAG |
| | | GCCCUGCGGCGGAUCGUGCCCCUGAUGGAGCAGGGCAAGCGGUACGACGAGGCCUGCGCCGAGAUCUACGGCGACCACUACGGCAAGAAGA |
| | | ACACCGAGGAGAAGAUCUACCUGCCCCCCAUCCCCGCCGACGAGAUCCGGAACCCCGUGGUGCUGCGGGCCCUGUCCCAGGCCCGGAAGGU |
| | | GAUCAACGGCGUGGUGCGGCGGUACGGCUCCCCCGCCCGGAUCCACAUCGAGACCGCCCGGGAGGUGGGCAAGUCCUUCAAGGACCGGAAG |
| | | GAGAUCGAGAAGCGGCAGGAGGAGAACCGGAAGGACCGGGAGAAGGCCGCCGCCAAGUUCCGGGAGUACUUCCCCAACUUCGUGGGCGAGC |
| | | CCAAGUCCAAGGACAUCCUGAAGCUGCGGCUGUACGAGCAGCAGCACGGCAAGUGCCUGUACUCCGGCAAGGAGAUCAACCUGGUGCGGCU |
| | | GAACGAGAAGGGCUACGUGGAGAUCGACCACGCCCUGCCCUUCUCCCGGACCUGGGACGACUCCUUCAACAACAAGGUGCUGGUGCUGGGC |
| | | UCCGAGAACCAGAACAAGGGCAACCAGACCCCCUACGAGUACUUCAACGGCAAGGACAACUCCCGGGAGUGGCAGGAGUUCAAGGCCCGGG |
| | | UGGAGACCUCCCGGUUCCCCCGGUCCAAGAAGCAGCGGAUCCUGCUGCAGAAGUUCGACGAGGACGGCUUCAAGGAGUGCAACCUGAACGA |
| | | CACCCGGUACGUGAACCGGUUCCUGUGCCAGUUCGUGGCCGACCACAUCCUGCUGACCGGCAAGGGCAAGCGGCGGGUGUUCGCCUCCAAC |
| | | GGCCAGAUCACCAACCUGCUGCGGGGCUUCUGGGGCCUGCGGAAGGUGCGGGCCGAGAACGACCGGCACCACGCCCUGGACGCCGUGGUGG |
| | | UGGCCUGCUCCACCGUGGCCAUGCAGCAGAAGAUCACCCGGUUCGUGCGGUACAAGGAGAUGAACGCCUUCGACGGCAAGACCAUCGACAA |
| | | GGAGACCGGCAAGGUGCUGCACCAGAAGACCCACUUCCCCCAGCCCUGGGAGUUCUUCGCCCAGGAGGUGAUGAUCCGGGUGUUCGGCAAG |
| | | CCCGACGGCAAGCCCGAGUUCGAGGAGGCCGACACCCCCGAGAAGCUGCGGACCCUGCUGGCCGAGAAGCUGUCCUCCCGGCCCGAGGCCG |
| | | UGCACGAGUACGUGACCCCCCUGUUCGUGUCCCGGGCCCCCAACCGGAAGAUGUCCGGCGCCCACAAGGACACCCUGCGGUCCGCCAAGCG |
| | | GUUCGUGAAGCACAACGAGAAGAUCUCCGUGAAGCGGGUGUGGCUGACCGAGAUCAAGCUGGCCGACCUGGAGAACAUGGUGAACUACAAG |
| | | AACGGCCGGGAGAUCGAGCUGUACGAGGCCCUGAAGGCCCGGCUGGAGGCCUACGGCGGCAACGCCAAGCAGGCCUUCGACCCCAAGGACA |
| | | ACCCCUUCUACAAGAAGGGCGGCCAGCUGGUGAAGGCCGUGCGGGUGGAGAAGACCCAGGAGUCCGGCGUGCUGCUGAACAAGAAGAACGC |
| | | CUACACCAUCGCCGACAACGGCGACAUGGUGCGGGUGGACGUGUUCUGCAAGGUGGACAAGAAGGGCAAGAACCAGUACUUCAUCGUGCCC |
| | | AUCUACGCCUGGCAGGUGGCCGAGAACAUCCUGCCCGACAUCGACUGCAAGGGCUACCGGAUCGACGACUCCUACACCUUCUGCUUCUCCC |
| | | UGCACAAGUACGACCUGAUCGCCUUCCAGAAGGACGAGAAGUCCAAGGUGGAGUUCGCCUACUACAUCAACUGCGACUCCUCCAACGGCCG |
| | | GUUCUACCUGGCCUGGCACGACAAGGGCUCCAAGGAGCAGCAGUUCCGGAUCUCCACCCAGAACCUGGUGCUGAUCCAGAAGUACCAGGUG |
| | | AACGAGCUGGGCAAGGAGAUCCGGCCCUGCCGGCUGAAGAAGCGGCCCCCCGUGCGGUCCGGCAAGCGGACCGCCGACGGCUCCGGCGGCG |
| | | GCUCCCCCAAGAAGAAGCGGAAGGUGGAGUAG |
| 34 | Nme2Cas9 | MIKIATRKYLGKQNVYDIGVERDHNFALKNGFIASNCWEGAPESATESGGTSTESEGSAGTSTESEGSAGSAGSTSGGSGGGSGGSGSAGT |
| | Intein | STESEGSAGTSESATESGGTSTESEGSSSGAAFKPNPINYILGLDIGIASVGWAMVEIDEEENPIRLIDLGVRVFERAEVPKTGDSLAMAR |
| | (mRNA J)- | RLARSVRRLTRRRAHRLLRARRLLKREGVLQAADFDENGLIKSLPNTPWQLRAAALDRKLTPLEWSAVLLHLI KHRGYLSQRKNEGETADK |
| | amino | ELGALLKGVANNAHALQTGDFRTPAELALNKFEKESGHIRNQRGDYSHTFSRKDLQAELILLFEKQKEFGNPHVSGGLKEGIETLLMTQRP |
| | acid | ALSGDAVQKMLGHCTFEPAEPKAAKNTYTAERFIWLTKLNNLRILEQGSERPLTDTERATLMDEPYRKSKLTYAQARKLLGLEDTAFFKGL |
| | sequence | RYGKDNAEASTLMEMKAYHAISRALEKEGLKDKKSPLNLSSELQDEIGTAFSLFKTDEDITGRLKDRVQPEILEALLKHISFDKFVQISLK |
| | | ALRRIVPLMEQGKRYDEACAEIYGDHYGKKNTEEKIYLPPIPADEIRNPVVLRALSQARKVINGVVRRYGSPARIHIETAREVGKSFKDRK |
| | | EIEKRQEENRKDREKAAAKFREYFPNFVGEPKSKDILKLRLYEQQHGKCLYSGKEINLVRLNEKGYVEIDHALPFSRTWDDSFNNKVLVLG |
| | | SENQNKGNQTPYEYFNGKDNSREWQEFKARVETSRFPRSKKQRILLQKFDEDGFKECNLNDTRYVNRFLCQFVADHILLTGKGKRRVFASN |
| | | GQITNLLRGFWGLRKVRAENDRHHALDAVVVACSTVAMQQKITRFVRYKEMNAFDGKTIDKETGKVLHQKTHFPQPWEFFAQEVMIRVFGK |
| | | PDGKPEFEEADTPEKLRTLLAEKLSSRPEAVHEYVTPLFVSRAPNRKMSGAHKDTLRSAKRFVKHNEKISVKRVWLTEIKLADLENMVNYK |
| | | NGREIELYEALKARLEAYGGNAKQAFDPKDNPFYKKGGQLVKAVRVEKTQESGVLLNKKNAYTIADNGDMVRVDVFCKVDKKGKNQYFIVP |
| | | IYAWQVAENILPDIDCKGYRIDDSYTFCFSLHKYDLIAFQKDEKSKVEFAYYINCDSSNGRFYLAWHDKGSKEQQFRISTQNLVLIQKYQV |
| | | NELGKEIRPCRLKKRPPVRSGKRTADGSGGGSPKKKRKVE* |
| 35 | SpyCas9 | GGGAAGCUCAGAAUAAACGCUCAACUUUGGCCGGAUCUGCCACCAUGGACAAGAAGUACUCCAUCGGCCUGGACAUCGGCACCAACUCCGU |
| | with | GGGCUGGGCCGUGAUCACCGACGAGUACAAGGUGCCCUCCAAGAAGUUCAAGGUGCUGGGCAACACCGACCGGCACUCCAUCAAGAAGAAC |
| | HiBit | CUGAUCGGCGCCCUGCUGUUCGACUCCGGCGAGACCGCCGAGGCCACCCGGCUGAAGCGGACCGCCCGGCGGCGGUACACCCGGCGGAAGA |
| | tag | ACCGGAUCUGCUACCUGCAGGAGAUCUUCUCCAACGAGAUGGCCAAGGUGGACGACUCCUUCUUCCACCGGCUGGAGGAGUCCUUCCUGGU |
| | (mRNA K)- | GGAGGAGGACAAGAAGCACGAGCGGCACCCCAUCUUCGGCAACAUCGUGGACGAGGUGGCCUACCACGAGAAGUACCCCACCAUCUACCAC |
| | mRNA | CUGCGGAAGAAGCUGGUGGACUCCACCGACAAGGCCGACCUGCGGCUGAUCUACCUGGCCCUGGCCCACAUGAUCAAGUUCCGGGGCCACU |
| | sequence | UCCUGAUCGAGGGCGACCUGAACCCCGACAACUCCGACGUGGACAAGCUGUUCAUCCAGCUGGUGCAGACCUACAACCAGCUGUUCGAGGA |
| | | GAACCCCAUCAACGCCUCCGGCGUGGACGCCAAGGCCAUCCUGUCCGCCCGGCUGUCCAAGUCCCGGCGGCUGGAGAACCUGAUCGCCCAG |
| | | CUGCCCGGCGAGAAGAAGAACGGCCUGUUCGGCAACCUGAUCGCCCUGUCCCUGGGCCUGACCCCCAACUUCAAGUCCAACUUCGACCUGG |
| | | CCGAGGACGCCAAGCUGCAGCUGUCCAAGGACACCUACGACGACGACCUGGACAACCUGCUGGCCCAGAUCGGCGACCAGUACGCCGACCU |
| | | GUUCCUGGCCGCCAAGAACCUGUCCGACGCCAUCCUGCUGUCCGACAUCCUGCGGGUGAACACCGAGAUCACCAAGGCCCCCCUGUCCGCC |
| | | UCCAUGAUCAAGCGGUACGACGAGCACCACCAGGACCUGACCCUGCUGAAGGCCCUGGUGCGGCAGCAGCUGCCCGAGAAGUACAAGGAGA |
| | | UCUUCUUCGACCAGUCCAAGAACGGCUACGCCGGCUACAUCGACGGCGGCGCCUCCCAGGAGGAGUUCUACAAGUUCAUCAAGCCCAUCCU |
| | | GGAGAAGAUGGACGGCACCGAGGAGCUGCUGGUGAAGCUGAACCGGGAGGACCUGCUGCGGAAGCAGCGGACCUUCGACAACGGCUCCAUC |
| | | CCCCACCAGAUCCACCUGGGCGAGCUGCACGCCAUCCUGCGGCGGCAGGAGGACUUCUACCCCUUCCUGAAGGACAACCGGGAGAAGAUCG |
| | | AGAAGAUCCUGACCUUCCGGAUCCCCUACUACGUGGGCCCCCUGGCCCGGGGCAACUCCCGGUUCGCCUGGAUGACCCGGAAGUCCGAGGA |
| | | GACCAUCACCCCCUGGAACUUCGAGGAGGUGGUGGACAAGGGCGCCUCCGCCCAGUCCUUCAUCGAGCGGAUGACCAACUUCGACAAGAAC |
| | | CUGCCCAACGAGAAGGUGCUGCCCAAGCACUCCCUGCUGUACGAGUACUUCACCGUGUACAACGAGCUGACCAAGGUGAAGUACGUGACCG |
| | | AGGGCAUGCGGAAGCCCGCCUUCCUGUCCGGCGAGCAGAAGAAGGCCAUCGUGGACCUGCUGUUCAAGACCAACCGGAAGGUGACCGUGAA |
| | | GCAGCUGAAGGAGGACUACUUCAAGAAGAUCGAGUGCUUCGACUCCGUGGAGAUCUCCGGCGUGGAGGACCGGUUCAACGCCUCCCUGGGC |
| | | ACCUACCACGACCUGCUGAAGAUCAUCAAGGACAAGGACUUCCUGGACAACGAGGAGAACGAGGACAUCCUGGAGGACAUCGUGCUGACCC |
| | | UGACCCUGUUCGAGGACCGGGAGAUGAUCGAGGAGCGGCUGAAGACCUACGCCCACCUGUUCGACGACAAGGUGAUGAAGCAGCUGAAGCG |
| | | GCGGCGGUACACCGGCUGGGGCCGGCUGUCCCGGAAGCUGAUCAACGGCAUCCGGGACAAGCAGUCCGGCAAGACCAUCCUGGACUUCCUG |
| | | AAGUCCGACGGCUUCGCCAACCGGAACUUCAUGCAGCUGAUCCACGACGACUCCCUGACCUUCAAGGAGGACAUCCAGAAGGCCCAGGUGU |
| | | CCGGCCAGGGCGACUCCCUGCACGAGCACAUCGCCAACCUGGCCGGCUCCCCCGCCAUCAAGAAGGGCAUCCUGCAGACCGUGAAGGUGGU |
| | | GGACGAGCUGGUGAAGGUGAUGGGCCGGCACAAGCCCGAGAACAUCGUGAUCGAGAUGGCCCGGGAGAACCAGACCACCCAGAAGGGCCAG |
| | | AAGAACUCCCGGGAGCGGAUGAAGCGGAUCGAGGAGGGCAUCAAGGAGCUGGGCUCCCAGAUCCUGAAGGAGCACCCCGUGGAGAACACCC |
| | | AGCUGCAGAACGAGAAGCUGUACCUGUACUACCUGCAGAACGGCCGGGACAUGUACGUGGACCAGGAGCUGGACAUCAACCGGCUGUCCGA |
| | | CUACGACGUGGACCACAUCGUGCCCCAGUCCUUCCUGAAGGACGACUCCAUCGACAACAAGGUGCUGACCCGGUCCGACAAGAACCGGGGC |
| | | AAGUCCGACAACGUGCCCUCCGAGGAGGUGGUGAAGAAGAUGAAGAACUACUGGCGGCAGCUGCUGAACGCCAAGCUGAUCACCCAGCGGA |
| | | AGUUCGACAACCUGACCAAGGCCGAGCGGGGCGGCCUGUCCGAGCUGGACAAGGCCGGCUUCAUCAAGCGGCAGCUGGUGGAGACCCGGCA |
| | | GAUCACCAAGCACGUGGCCCAGAUCCUGGACUCCCGGAUGAACACCAAGUACGACGAGAACGACAAGCUGAUCCGGGAGGUGAAGGUGAUC |
| | | ACCCUGAAGUCCAAGCUGGUGUCCGACUUCCGGAAGGACUUCCAGUUCUACAAGGUGCGGGAGAUCAACAACUACCACCACGCCCACGACG |
| | | CCUACCUGAACGCCGUGGUGGGCACCGCCCUGAUCAAGAAGUACCCCAAGCUGGAGUCCGAGUUCGUGUACGGCGACUACAAGGUGUACGA |
| | | CGUGCGGAAGAUGAUCGCCAAGUCCGAGCAGGAGAUCGGCAAGGCCACCGCCAAGUACUUCUUCUACUCCAACAUCAUGAACUUCUUCAAG |
| | | ACCGAGAUCACCCUGGCCAACGGCGAGAUCCGGAAGCGGCCCCUGAUCGAGACCAACGGCGAGACCGGCGAGAUCGUGUGGGACAAGGGCC |
| | | GGGACUUCGCCACCGUGCGGAAGGUGCUGUCCAUGCCCCAGGUGAACAUCGUGAAGAAGACCGAGGUGCAGACCGGCGGCUUCUCCAAGGA |
| | | GUCCAUCCUGCCCAAGCGGAACUCCGACAAGCUGAUCGCCCGGAAGAAGGACUGGGACCCCAAGAAGUACGGCGGCUUCGACUCCCCCACC |
| | | GUGGCCUACUCCGUGCUGGUGGUGGCCAAGGUGGAGAAGGGCAAGUCCAAGAAGCUGAAGUCCGUGAAGGAGCUGCUGGGCAUCACCAUCA |
| | | UGGAGCGGUCCUCCUUCGAGAAGAACCCCAUCGACUUCCUGGAGGCCAAGGGCUACAAGGAGGUGAAGAAGGACCUGAUCAUCAAGCUGCC |
| | | CAAGUACUCCCUGUUCGAGCUGGAGAACGGCCGGAAGCGGAUGCUGGCCUCCGCCGGCGAGCUGCAGAAGGGCAACGAGCUGGCCCUGCCC |
| | | UCCAAGUACGUGAACUUCCUGUACCUGGCCUCCCACUACGAGAAGCUGAAGGGCUCCCCCGAGGACAACGAGCAGAAGCAGCUGUUCGUGG |
| | | AGCAGCACAAGCACUACCUGGACGAGAUCAUCGAGCAGAUCUCCGAGUUCUCCAAGCGGGUGAUCCUGGCCGACGCCAACCUGGACAAGGU |
| | | GCUGUCCGCCUACAACAAGCACCGGGACAAGCCCAUCCGGGAGCAGGCCGAGAACAUCAUCCACCUGUUCACCCUGACCAACCUGGGCGCC |
| | | CCCGCCGCCUUCAAGUACUUCGACACCACCAUCGACCGGAAGCGGUACACCUCCACCAAGGAGGUGCUGGACGCCACCCUGAUCCACCAGU |
| | | CCAUCACCGGCCUGUACGAGACCCGGAUCGACCUGUCCCAGCUGGGCGGCGACGGCGGCGGCUCCCCCAAGAAGAAGCGGAAGGUGUCCGA |
| | | GUCCGCCACCCCCGAGUCCGUGUCCGGCUGGCGGCUGUUCAAGAAGAUCUCCUGACUAGCACCAGCCUCAAGAACACCCGAAUGGAGUCUC |
| | | UAAGCUACAUAAUACCAACUUACACUUUACAAAAUGUUGUCCCCCAAAAUGUAGCCAUUCGUAUCUGCUCCUAAUAAAAAGAAAGUUUCUU |
| | | CACAUUCUCUCGAGAAAAAAAAAAAAAAAAAAAAAAAAAAAAAAAAAAAAAAAAAAAAAAAAAAAAAAAAAAAAAAAAAAAAAAAAAAAAA |
| | | AAAAAAAAAAAAAAAAUCUAG |
| 36 | SpyCas9 | auggacaagaaguacuccaucggccuggacaucggcaccaacuccgugggcugggccgugaucaccgacgaguacaaggugcccuccaaga |
| | with | aguucaaggugcugggcaacaccgaccggcacuccaucaagaagaaccugaucggcgcccugcuguucgacuccggcgagaccgccgaggc |
| | HiBit | cacccggcugaagcggaccgcccggcggcgguacacccggcggaagaaccggaucugcuaccugcaggagaucuucuccaacgagauggcc |
| | tag | aagguggacgacuccuucuuccaccggcuggaggaguccuuccugguggaggaggacaagaagcacgagcggcaccccaucuucggcaaca |
| | (mRNA K)- | ucguggacgagguggccuaccacgagaaguaccccaccaucuaccaccugcggaagaagcugguggacuccaccgacaaggccgaccugcg |
| | ORF | gcugaucuaccuggcccuggcccacaugaucaaguuccggggccacuuccugaucgaggcggaccugaaccccgacaacuccgacguggac |
| | sequence | aagcuguucauccagcuggugcagaccuacaaccagcuguucgaggagaaccccaucaacgccuccggcguggacgccaaggccauccugu |
| | | ccgcccggcuguccaagucccggcggcuggagaaccugaucgcccagcugcccggcgagaagaagaacggccuguucggcaaccugaucgc |
| | | ccugucccugggccugacccccaacuucaaguccaacuucgaccuggccgaggacgccaagcugcagcuguccaaggacaccuacgacgac |
| | | gaccuggacaaccugcuggcccagaucggcgaccaguacgccgaccuguuccuggccgccaagaaccuguccgacgccauccugcuguccg |
| | | acauccugcgggugaacaccgagaucaccaaggccccccuguccgccuccaugaucaagcgguacgacgagcaccaccaggaccugacccu |
| | | gcugaaggcccuggugcggcagcagcugcccgagaaguacaaggagaucuucuucgaccaguccaagaacggcuacgccggcuacaucgac |
| | | ggcggcgccucccaggaggaguucuacaaguucaucaagcccauccuggagaagauggacggcaccgaggagcugcuggugaagcugaacc |
| | | gggaggaccugcugcggaagcagcggaccuucgacaacggcuccaucccccaccagauccaccugggcgagcugcacgccauccugcggcg |
| | | gcaggaggacuucuaccccuuccugaaggacaaccgggagaagaucgagaagauccugaccuuccggauccccuacuacgugggcccccug |
| | | gcccggggcaacucccgguucgccuggaugacccggaaguccgaggagaccaucacccccuggaacuucgaggaggugguggacaagggcg |
| | | ccuccgcccaguccuucaucgagcggaugaccaacuucgacaagaaccugcccaacgagaaggugcugcccaagcacucccugcuguacga |
| | | guacuucaccguguacaacgagcugaccaaggugaaguacgugaccgagggcaugcggaagcccgccuuccuguccggcgagcagaagaag |
| | | gccaucguggaccugcuguucaagaccaaccggaaggugaccgugaagcagcugaaggaggacuacuucaagaagaucgagugcuucgacu |
| | | ccguggagaucuccggcguggaggaccgguucaacgccucccugggcaccuaccacgaccugcugaagaucaucaaggacaaggacuuccu |
| | | ggacaacgaggagaacgaggacauccuggaggacaucgugcugacccugacccuguucgaggaccgggagaugaucgaggagcggcugaag |
| | | accuacgcccaccuguucgacgacaaggugaugaagcagcugaagcggcggcgguacaccggcuggggccggcugucccggaagcugauca |
| | | acggcauccgggacaagcaguccggcaagaccauccuggacuuccugaaguccgacggcuucgccaaccggaacuucaugcagcugaucca |
| | | cgacgacucccugaccuucaaggaggacauccagaaggcccagguguccggccagggcgacucccugcacgagcacaucgccaaccuggcc |
| | | ggcucccccgccaucaagaagggcauccugcagaccgugaaggugguggacgagcuggugaaggugaugggccggcacaagcccgagaaca |
| | | ucgugaucgagauggcccgggagaaccagaccacccagaagggccagaagaacucccgggagcggaugaagcggaucgaggagggcaucaa |
| | | ggagcugggcucccagauccugaaggagcaccccguggagaacacccagcugcagaacgagaagcuguaccuguacuaccugcagaacggc |
| | | cgggacauguacguggaccaggagcuggacaucaaccggcuguccgacuacgacguggaccacaucgugccccaguccuuccugaaggacg |
| | | acuccaucgacaacaaggugcugacccgguccgacaagaaccggggcaaguccgacaacgugcccuccgaggagguggugaagaagaugaa |
| | | gaacuacuggcggcagcugcugaacgccaagcugaucacccagcggaaguucgacaaccugaccaaggccgagcggcggggccuguccgag |
| | | cuggacaaggccggcuucaucaagcggcagcugguggagacccggcagaucaccaagcacguggcccagauccuggacucccggaugaaca |
| | | ccaaguacgacgagaacgacaagcugauccgggaggugaaggugaucacccugaaguccaagcugguguccgacuuccggaaggacuucca |
| | | guucuacaaggugcgggagaucaacaacuaccaccacgcccacgacgccuaccugaacgccguggugggcaccgcccugaucaagaaguac |
| | | cccaagcuggaguccgaguucguguacggcgacuacaagguguacgacgugcggaagaugaucgccaaguccgagcaggagaucggcaagg |
| | | ccaccgccaaguacuucuucuacuccaacaucaugaacuucuucaagaccgagaucacccuggccaacggcgagauccggaagcggccccu |
| | | gaucgagaccaacggcgagaccggcgagaucgugugggacaagggccgggacuucgccaccgugcggaaggugcuguccaugccccaggug |
| | | aacaucgugaagaagaccgaggugcagaccggcggcuucuccaaggaguccauccugcccaagcggaacuccgacaagcugaucgcccgga |
| | | agaaggacugggaccccaagaaguacggcggcuucgacucccccaccguggccuacuccgugcuggugguggccaagguggagaagggcaa |
| | | guccaagaagcugaaguccgugaaggagcugcugggcaucaccaucauggagcgguccuccuucgagaagaaccccaucgacuuccuggag |
| | | gccaagggcuacaaggaggugaagaaggaccugaucaucaagcugcccaaguacucccuguucgagcuggagaacggccggaagcggaugc |
| | | uggccuccgccggcgagcugcagaagggcaacgagcuggcccugcccuccaaguacgugaacuuccuguaccuggccucccacuacgagaa |
| | | gcugaagggcucccccgaggacaacgagcagaagcagcuguucguggagcagcacaagcacuaccuggacgagaucaucgagcagaucucc |
| | | gaguucuccaagcgggugauccuggccgacgccaaccuggacaaggugcuguccgccuacaacaagcaccgggacaagcccauccgggagc |
| | | aggccgagaacaucauccaccuguucacccugaccaaccugcgggcccccgccgccuucaaguacuucgacaccaccaucgaccggaagcg |
| | | guacaccuccaccaaggaggugcuggacgccacccugauccaccaguccaucaccggccuguacgagacccggaucgaccugucccagcug |
| | | ggcggcgacggcggcggcucccccaagaagaagcggaagguguccgaguccgccacccccgaguccguguccggcuggcggcuguucaaga |
| | | agaucuccuga |
| 37 | SpyCas9 | MDKKYSIGLDIGTNSVGWAVITDEYKVPSKKFKVLGNTDRHSIKKNLIGALLFDSGETAEATRLKRTARRRYTRRKNRICYLQEIFSNEMA |
| | with | KVDDSFFHRLEESFLVEEDKKHERHPIFGNIVDEVAYHEKYPTIYHLRKKLVDSTDKADLRLIYLALAHMIKFRGHFLIEGDLNPDNSDVD |
| | HiBit | KLFIQLVQTYNQLFEENPINASGVDAKAILSARLSKSRRLENLIAQLPGEKKNGLFGNLIALSLGLTPNFKSNFDLAEDAKLQLSKDTYDD |
| | tag | DLDNLLAQIGDQYADLFLAAKNLSDAILLSDILRVNTEITKAPLSASMIKRYDEHHQDLTLLKALVRQQLPEKYKEIFFDQSKNGYAGYID |
| | (mRNA K)- | GGASQEEFYKFIKPILEKMDGTEELLVKLNREDLLRKQRTFDNGSIPHQIHLGELHAILRRQEDFYPFLKDNREKIEKILTFRIPYYVGPL |
| | amino | ARGNSRFAWMTRKSEETITPWNFEEVVDKGASAQSFIERMTNFDKNLPNEKVLPKHSLLYEYFTVYNELTKVKYVTEGMRKPAFLSGEQKK |
| | acid | AIVDLLFKTNRKVTVKQLKEDYFKKIECFDSVEISGVEDRFNASLGTYHDLLKIIKDKDFLDNEENEDILEDIVLTLTLFEDREMIEERLK |
| | sequence | TYAHLFDDKVMKQLKRRRYTGWGRLSRKLINGIRDKQSGKTILDFLKSDGFANRNFMQLIHDDSLTFKEDIQKAQVSGQGDSLHEHIANLA |
| | | GSPAIKKGILQTVKVVDELVKVMGRHKPENIVIEMARENQTTQKGQKNSRERMKRIEEGIKELGSQILKEHPVENTQLQNEKLYLYYLQNG |
| | | RDMYVDQELDINRLSDYDVDHIVPQSFLKDDSIDNKVLTRSDKNRGKSDNVPSEEVVKKMKNYWRQLLNAKLITQRKFDNLTKAERGGLSE |
| | | LDKAGFIKRQLVETRQITKHVAQILDSRMNTKYDENDKLIREVKVITLKSKLVSDFRKDFQFYKVREINNYHHAHDAYLNAVVGTALIKKY |
| | | PKLESEFVYGDYKVYDVRKMIAKSEQEIGKATAKYFFYSNIMNFFKTEITLANGEIRKRPLIETNGETGEIVWDKGRDFATVRKVLSMPQV |
| | | NIVKKTEVQTGGFSKESILPKRNSDKLIARKKDWDPKKYGGFDSPTVAYSVLVVAKVEKGKSKKLKSVKELLGITIMERSSFEKNPIDFLE |
| | | AKGYKEVKKDLIIKLPKYSLFELENGRKRMLASAGELQKGNELALPSKYVNFLYLASHYEKLKGSPEDNEQKQLFVEQHKHYLDEIIEQIS |
| | | EFSKRVILADANLDKVLSAYNKHRDKPIREQAENIIHLFTLTNLGAPAAFKYFDTTIDRKRYTSTKEVLDATLIHQSITGLYETRIDLSQL |
| | | GGDGGGSPKKKRKVSESATPESVSGWRLFKKIS* |
| 38 | Cas9- | GGGAAGCUCAGAAUAAACGCUCAACUUUGGCCGGAUCUGCCACCAUGGACAAGAAGUACUCCAUCGGCCUGGACAUCGGCACCAACUCCGU |
| | Cas9 | GGGCUGGGCCGUGAUCACCGACGAGUACAAGGUGCCCUCCAAGAAGUUCAAGGUGCUGGGCAACACCGACCGGCACUCCAUCAAGAAGAAC |
| | fusion | CUGAUCGGCGCCCUGCUGUUCGACUCCGGCGAGACCGCCGAGGCCACCCGGCUGAAGCGGACCGCCCGGCGGCGGUACACCCGGCGGAAGA |
| | (mRNA L)- | ACCGGAUCUGCUACCUGCAGGAGAUCUUCUCCAACGAGAUGGCCAAGGUGGACGACUCCUUCUUCCACCGGCUGGAGGAGUCCUUCCUGGU |
| | mRNA | GGAGGAGGACAAGAAGCACGAGCGGCACCCCAUCUUCGGCAACAUCGUGGACGAGGUGGCCUACCACGAGAAGUACCCCACCAUCUACCAC |
| | sequence | CUGCGGAAGAAGCUGGUGGACUCCACCGACAAGGCCGACCUGCGGCUGAUCUACCUGGCCCUGGCCCACAUGAUCAAGUUCCGGGGCCACU |
| | | UCCUGAUCGAGGGCGACCUGAACCCCGACAACUCCGACGUGGACAAGCUGUUCAUCCAGCUGGUGCAGACCUACAACCAGCUGUUCGAGGA |
| | | GAACCCCAUCAACGCCUCCGGCGUGGACGCCAAGGCCAUCCUGUCCGCCCGGCUGUCCAAGUCCCGGCGGCUGGAGAACCUGAUCGCCCAG |
| | | CUGCCCGGCGAGAAGAAGAACGGCCUGUUCGGCAACCUGAUCGCCCUGUCCCUGGGCCUGACCCCCAACUUCAAGUCCAACUUCGACCUGG |
| | | CCGAGGACGCCAAGCUGCAGCUGUCCAAGGACACCUACGACGACGACCUGGACAACCUGCUGGCCCAGAUCGGCGACCAGUACGCCGACCU |
| | | GUUCCUGGCCGCCAAGAACCUGUCCGACGCCAUCCUGCUGUCCGACAUCCUGCGGGUGAACACCGAGAUCACCAAGGCCCCCCUGUCCGCC |
| | | UCCAUGAUCAAGCGGUACGACGAGCACCACCAGGACCUGACCCUGCUGAAGGCCCUGGUGCGGCAGCAGCUGCCCGAGAAGUACAAGGAGA |
| | | UCUUCUUCGACCAGUCCAAGAACGGCUACGCCGGCUACAUCGACGGCGGCGCCUCCCAGGAGGAGUUCUACAAGUUCAUCAAGCCCAUCCU |
| | | GGAGAAGAUGGACGGCACCGAGGAGCUGCUGGUGAAGCUGAACCGGGAGGACCUGCUGCGGAAGCAGCGGACCUUCGACAACGGCUCCAUC |
| | | CCCCACCAGAUCCACCUGGGCGAGCUGCACGCCAUCCUGCGGCGGCAGGAGGACUUCUACCCCUUCCUGAAGGACAACCGGGAGAAGAUCG |
| | | AGAAGAUCCUGACCUUCCGGAUCCCCUACUACGUGGGCCCCCUGGCCCGGGGCAACUCCCGGUUCGCCUGGAUGACCCGGAAGUCCGAGGA |
| | | GACCAUCACCCCCUGGAACUUCGAGGAGGUGGUGGACAAGGGCGCCUCCGCCCAGUCCUUCAUCGAGCGGAUGACCAACUUCGACAAGAAC |
| | | CUGCCCAACGAGAAGGUGCUGCCCAAGCACUCCCUGCUGUACGAGUACUUCACCGUGUACAACGAGCUGACCAAGGUGAAGUACGUGACCG |
| | | AGGGCAUGCGGAAGCCCGCCUUCCUGUCCGGCGAGCAGAAGAAGGCCAUCGUGGACCUGCUGUUCAAGACCAACCGGAAGGUGACCGUGAA |
| | | GCAGCUGAAGGAGGACUACUUCAAGAAGAUCGAGUGCUUCGACUCCGUGGAGAUCUCCGGCGUGGAGGACCGGUUCAACGCCUCCCUGGGC |
| | | ACCUACCACGACCUGCUGAAGAUCAUCAAGGACAAGGACUUCCUGGACAACGAGGAGAACGAGGACAUCCUGGAGGACAUCGUGCUGACCC |
| | | UGACCCUGUUCGAGGACCGGGAGAUGAUCGAGGAGCGGCUGAAGACCUACGCCCACCUGUUCGACGACAAGGUGAUGAAGCAGCUGAAGCG |
| | | GCGGCGGUACACCGGCUGGGGCCGGCUGUCCCGGAAGCUGAUCAACGGCAUCCGGGACAAGCAGUCCGGCAAGACCAUCCUGGACUUCCUG |
| | | AAGUCCGACGGCUUCGCCAACCGGAACUUCAUGCAGCUGAUCCACGACGACUCCCUGACCUUCAAGGAGGACAUCCAGAAGGCCCAGGUGU |
| | | CCGGCCAGGGCGACUCCCUGCACGAGCACAUCGCCAACCUGGCCGGCUCCCCCGCCAUCAAGAAGGGCAUCCUGCAGACCGUGAAGGUGGU |
| | | GGACGAGCUGGUGAAGGUGAUGGGCCGGCACAAGCCCGAGAACAUCGUGAUCGAGAUGGCCCGGGAGAACCAGACCACCCAGAAGGGCCAG |
| | | AAGAACUCCCGGGAGCGGAUGAAGCGGAUCGAGGAGGGCAUCAAGGAGCUGGGCUCCCAGAUCCUGAAGGAGCACCCCGUGGAGAACACCC |
| | | AGCUGCAGAACGAGAAGCUGUACCUGUACUACCUGCAGAACGGCCGGGACAUGUACGUGGACCAGGAGCUGGACAUCAACCGGCUGUCCGA |
| | | CUACGACGUGGACCACAUCGUGCCCCAGUCCUUCCUGAAGGACGACUCCAUCGACAACAAGGUGCUGACCCGGUCCGACAAGAACCGGGGC |
| | | AAGUCCGACAACGUGCCCUCCGAGGAGGUGGUGAAGAAGAUGAAGAACUACUGGCGGCAGCUGCUGAACGCCAAGCUGAUCACCCAGCGGA |
| | | AGUUCGACAACCUGACCAAGGCCGAGCGGGGCGGCCUGUCCGAGCUGGACAAGGCCGGCUUCAUCAAGCGGCAGCUGGUGGAGACCCGGCA |
| | | GAUCACCAAGCACGUGGCCCAGAUCCUGGACUCCCGGAUGAACACCAAGUACGACGAGAACGACAAGCUGAUCCGGGAGGUGAAGGUGAUC |
| | | ACCCUGAAGUCCAAGCUGGUGUCCGACUUCCGGAAGGACUUCCAGUUCUACAAGGUGCGGGAGAUCAACAACUACCACCACGCCCACGACG |
| | | CCUACCUGAACGCCGUGGUGGGCACCGCCCUGAUCAAGAAGUACCCCAAGCUGGAGUCCGAGUUCGUGUACGGCGACUACAAGGUGUACGA |
| | | CGUGCGGAAGAUGAUCGCCAAGUCCGAGCAGGAGAUCGGCAAGGCCACCGCCAAGUACUUCUUCUACUCCAACAUCAUGAACUUCUUCAAG |
| | | ACCGAGAUCACCCUGGCCAACGGCGAGAUCCGGAAGCGGCCCCUGAUCGAGACCAACGGCGAGACCGGCGAGAUCGUGUGGGACAAGGGCC |
| | | GGGACUUCGCCACCGUGCGGAAGGUGCUGUCCAUGCCCCAGGUGAACAUCGUGAAGAAGACCGAGGUGCAGACCGGCGGCUUCUCCAAGGA |
| | | GUCCAUCCUGCCCAAGCGGAACUCCGACAAGCUGAUCGCCCGGAAGAAGGACUGGGACCCCAAGAAGUACGGCGGCUUCGACUCCCCCACC |
| | | GUGGCCUACUCCGUGCUGGUGGUGGCCAAGGUGGAGAAGGGCAAGUCCAAGAAGCUGAAGUCCGUGAAGGAGCUGCUGGGCAUCACCAUCA |
| | | UGGAGCGGUCCUCCUUCGAGAAGAACCCCAUCGACUUCCUGGAGGCCAAGGGCUACAAGGAGGUGAAGAAGGACCUGAUCAUCAAGCUGCC |
| | | CAAGUACUCCCUGUUCGAGCUGGAGAACGGCCGGAAGCGGAUGCUGGCCUCCGCCGGCGAGCUGCAGAAGGGCAACGAGCUGGCCCUGCCC |
| | | UCCAAGUACGUGAACUUCCUGUACCUGGCCUCCCACUACGAGAAGCUGAAGGGCUCCCCCGAGGACAACGAGCAGAAGCAGCUGUUCGUGG |
| | | AGCAGCACAAGCACUACCUGGACGAGAUCAUCGAGCAGAUCUCCGAGUUCUCCAAGCGGGUGAUCCUGGCCGACGCCAACCUGGACAAGGU |
| | | GCUGUCCGCCUACAACAAGCACCGGGACAAGCCCAUCCGGGAGCAGGCCGAGAACAUCAUCCACCUGUUCACCCUGACCAACCUGGGCGCC |
| | | CCCGCCGCCUUCAAGUACUUCGACACCACCAUCGACAAGAAGCGGUACACCUCCACCAAGGAGGUGCUGGACGCCACCCUGAUCCACCAGU |
| | | CCAUCACCGGCCUGUACGAGACCCGGAUCGACCUGUCCCAGCUGGGGGGCGACGGCGCCCCCGAGUCCGCCACCGAGUCCGGCGGCACCUC |
| | | CACCGAGUCCGAGGGCUCCGCCGGCACCUCCACCGAGUCCGAGGGCUCCGCCGGCUCCGCCGGCUCCACCUCCGGCGGCUCCGGCGGCGGC |
| | | UCCGGCGGCUCCGGCUCCGCCGGCACCUCCACCGAGUCCGAGGGCUCCGCCGGCACCUCCGAGUCCGCCACCGAGUCCGGCGGCACCUCCA |
| | | CCGAGUCCGAGGGCUCCUCCUCCGGCGCCGCCUUCAAGCCCAACCCCAUCAACUACAUCCUGGGCCUGGACAUCGGCAUCGCCUCCGUGGG |
| | | CUGGGCCAUGGUGGAGAUCGACGAGGAGGAGAACCCCAUCCGGCUGAUCGACCUGGGCGUGCGGGUGUUCGAGCGGGCCGAGGUGCCCAAG |
| | | ACCGGCGACUCCCUGGCCAUGGCCCGGCGGCUGGCCCGGUCCGUGCGGCGGCUGACCCGGCGGCGGGCCCACCGGCUGCUGCGGGCCCGGC |
| | | GGCUGCUGAAGCGGGAGGGCGUGCUGCAGGCCGCCGACUUCGACGAGAACGGCCUGAUCAAGUCCCUGCCCAACACCCCCUGGCAGCUGCG |
| | | GGCCGCCGCCCUGGACCGGAAGCUGACCCCCCUGGAGUGGUCCGCCGUGCUGCUGCACCUGAUCAAGCACCGGGGCUACCUGUCCCAGCGG |
| | | AAGAACGAGGGCGAGACCGCCGACAAGGAGCUGGGCGCCCUGCUGAAGGGCGUGGCCAACAACGCCCACGCCCUGCAGACCGGCGACUUCC |
| | | GGACCCCCGCCGAGCUGGCCCUGAACAAGUUCGAGAAGGAGUCCGGCCACAUCCGGAACCAGCGGGGCGACUACUCCCACACCUUCUCCCG |
| | | GAAGGACCUGCAGGCCGAGCUGAUCCUGCUGUUCGAGAAGCAGAAGGAGUUCGGCAACCCCCACGUGUCCGGCGGCCUGAAGGAGGGCAUC |
| | | GAGACCCUGCUGAUGACCCAGCGGCCCGCCCUGUCCGGCGACGCCGUGCAGAAGAUGCUGGGCCACUGCACCUUCGAGCCCGCCGAGCCCA |
| | | AGGCCGCCAAGAACACCUACACCGCCGAGCGGUUCAUCUGGCUGACCAAGCUGAACAACCUGCGGAUCCUGGAGCAGGGCUCCGAGCGGCC |
| | | CCUGACCGACACCGAGCGGGCCACCCUGAUGGACGAGCCCUACCGGAAGUCCAAGCUGACCUACGCCCAGGCCCGGAAGCUGCUGGGCCUG |
| | | GAGGACACCGCCUUCUUCAAGGGCCUGCGGUACGGCAAGGACAACGCCGAGGCCUCCACCCUGAUGGAGAUGAAGGCCUACCACGCCAUCU |
| | | CCCGGGCCCUGGAGAAGGAGGGCCUGAAGGACAAGAAGUCCCCCCUGAACCUGUCCUCCGAGCUGCAGGACGAGAUCGGCACCGCCUUCUC |
| | | CCUGUUCAAGACCGACGAGGACAUCACCGGCCGGCUGAAGGACCGGGUGCAGCCCGAGAUCCUGGAGGCCCUGCUGAAGCACAUCUCCUUC |
| | | GACAAGUUCGUGCAGAUCUCCCUGAAGGCCCUGCGGCGGAUCGUGCCCCUGAUGGAGCAGGGCAAGCGGUACGACGAGGCCUGCGCCGAGA |
| | | UCUACGGCGACCACUACGGCAAGAAGAACACCGAGGAGAAGAUCUACCUGCCCCCCAUCCCCGCCGACGAGAUCCGGAACCCCGUGGUGCU |
| | | GCGGGCCCUGUCCCAGGCCCGGAAGGUGAUCAACGGCGUGGUGCGGCGGUACGGCUCCCCCGCCCGGAUCCACAUCGAGACCGCCCGGGAG |
| | | GUGGGCAAGUCCUUCAAGGACCGGAAGGAGAUCGAGAAGCGGCAGGAGGAGAACCGGAAGGACCGGGAGAAGGCCGCCGCCAAGUUCCGGG |
| | | AGUACUUCCCCAACUUCGUGGGCGAGCCCAAGUCCAAGGACAUCCUGAAGCUGCGGCUGUACGAGCAGCAGCACGGCAAGUGCCUGUACUC |
| | | CGGCAAGGAGAUCAACCUGGUGCGGCUGAACGAGAAGGGCUACGUGGAGAUCGACCACGCCCUGCCCUUCUCCCGGACCUGGGACGACUCC |
| | | UUCAACAACAAGGUGCUGGUGCUGGGCUCCGAGAACCAGAACAAGGGCAACCAGACCCCCUACGAGUACUUCAACGGCAAGGACAACUCCC |
| | | GGGAGUGGCAGGAGUUCAAGGCCCGGGUGGAGACCUCCCGGUUCCCCCGGUCCAAGAAGCAGCGGAUCCUGCUGCAGAAGUUCGACGAGGA |
| | | CGGCUUCAAGGAGUGCAACCUGAACGACACCCGGUACGUGAACCGGUUCCUGUGCCAGUUCGUGGCCGACCACAUCCUGCUGACCGGCAAG |
| | | GGCAAGCGGCGGGUGUUCGCCUCCAACGGCCAGAUCACCAACCUGCUGCGGGGCUUCUGGGGCCUGCGGAAGGUGCGGGCCGAGAACGACC |
| | | GGCACCACGCCCUGGACGCCGUGGUGGUGGCCUGCUCCACCGUGGCCAUGCAGCAGAAGAUCACCCGGUUCGUGCGGUACAAGGAGAUGAA |
| | | CGCCUUCGACGGCAAGACCAUCGACAAGGAGACCGGCAAGGUGCUGCACCAGAAGACCCACUUCCCCCAGCCCUGGGAGUUCUUCGCCCAG |
| | | GAGGUGAUGAUCCGGGUGUUCGGCAAGCCCGACGGCAAGCCCGAGUUCGAGGAGGCCGACACCCCCGAGAAGCUGCGGACCCUGCUGGCCG |
| | | AGAAGCUGUCCUCCCGGCCCGAGGCCGUGCACGAGUACGUGACCCCCCUGUUCGUGUCCCGGGCCCCCAACCGGAAGAUGUCCGGCGCCCA |
| | | CAAGGACACCCUGCGGUCCGCCAAGCGGUUCGUGAAGCACAACGAGAAGAUCUCCGUGAAGCGGGUGUGGCUGACCGAGAUCAAGCUGGCC |
| | | GACCUGGAGAACAUGGUGAACUACAAGAACGGCCGGGAGAUCGAGCUGUACGAGGCCCUGAAGGCCCGGCUGGAGGCCUACGGCGGCAACG |
| | | CCAAGCAGGCCUUCGACCCCAAGGACAACCCCUUCUACAAGAAGGGCGGCCAGCUGGUGAAGGCCGUGCGGGUGGAGAAGACCCAGGAGUC |
| | | CGGCGUGCUGCUGAACAAGAAGAACGCCUACACCAUCGCCGACAACGGCGACAUGGUGCGGGUGGACGUGUUCUGCAAGGUGGACAAGAAG |
| | | GGCAAGAACCAGUACUUCAUCGUGCCCAUCUACGCCUGGCAGGUGGCCGAGAACAUCCUGCCCGACAUCGACUGCAAGGGCUACCGGAUCG |
| | | ACGACUCCUACACCUUCUGCUUCUCCCUGCACAAGUACGACCUGAUCGCCUUCCAGAAGGACGAGAAGUCCAAGGUGGAGUUCGCCUACUA |
| | | CAUCAACUGCGACUCCUCCAACGGCCGGUUCUACCUGGCCUGGCACGACAAGGGCUCCAAGGAGCAGCAGUUCCGGAUCUCCACCCAGAAC |
| | | CUGGUGCUGAUCCAGAAGUACCAGGUGAACGAGCUGGGCAAGGAGAUCCGGCCCUGCCGGCUGAAGAAGCGGCCCCCCGUGCGGUCCGGCA |
| | | AGCGGACCGCCGACGGCUCCGGCGGCGGCUCCCCCAAGAAGAAGCGGAAGGUGGAGUAGCUAGCACCAGCCUCAAGAACACCCGAAUGGAG |
| | | UCUCUAAGCUACAUAAUACCAACUUACACUUUACAAAAUGUUGUCCCCCAAAAUGUAGCCAUUCGUAUCUGCUCCUAAUAAAAAGAAAGUU |
| | | UCUUCACAUUCUCUCGAGAAAAAAAAAAAAUGGAAAAAAAAAAAACGGAAAAAAAAAAAAGGUAAAAAAAAAAAAUAUAAAAAAAAAAAAC |
| | | AUAAAAAAAAAAAACGAAAAAAAAAAAACGUAAAAAAAAAAAACUCAAAAAAAAAAAGAUAAAAAAAAAAAACCUAAAAAAAAAAAAUGUA |
| | | AAAAAAAAAAAGGGAAAAAAAAAAAACGCAAAAAAAAAAAACACAAAAAAAAAAAAUGCAAAAAAAAAAAAUCGAAAAAAAAAAAAUCUAA |
| | | AAAAAAAAAACGAAAAAAAAAAAACCCAAAAAAAAAAAAGACAAAAAAAAAAAAUAGAAAAAAAAAAAGUUAAAAAAAAAAAACUGAAAAA |
| | | AAAAAAAUUUAAAAAAAAAAAAUCUAG |
| 39 | Cas9- | AUGGACAAGAAGUACUCCAUCGGCCUGGACAUCGGCACCAACUCCGUGGGCUGGGCCGUGAUCACCGACGAGUACAAGGUGCCCUCCAAGA |
| | Cas9 | AGUUCAAGGUGCUGGGCAACACCGACCGGCACUCCAUCAAGAAGAACCUGAUCGGCGCCCUGCUGUUCGACUCCGGCGAGACCGCCGAGGC |
| | fusion | CACCCGGCUGAAGCGGACCGCCCGGCGGCGGUACACCCGGCGGAAGAACCGGAUCUGCUACCUGCAGGAGAUCUUCUCCAACGAGAUGGCC |
| | (mRNA L)- | AAGGUGGACGACUCCUUCUUCCACCGGCUGGAGGAGUCCUUCCUGGUGGAGGAGGACAAGAAGCACGAGCGGCACCCCAUCUUCGGCAACA |
| | ORF | UCGUGGACGAGGUGGCCUACCACGAGAAGUACCCCACCAUCUACCACCUGCGGAAGAAGCUGGUGGACUCCACCGACAAGGCCGACCUGCG |
| | sequence | GCUGAUCUACCUGGCCCUGGCCCACAUGAUCAAGUUCCGGGGCCACUUCCUGAUCGAGGGCGACCUGAACCCCGACAACUCCGACGUGGAC |
| | | AAGCUGUUCAUCCAGCUGGUGCAGACCUACAACCAGCUGUUCGAGGAGAACCCCAUCAACGCCUCCGGCGUGGACGCCAAGGCCAUCCUGU |
| | | CCGCCCGGCUGUCCAAGUCCCGGCGGCUGGAGAACCUGAUCGCCCAGCUGCCCGGCGAGAAGAAGAACGGCCUGUUCGGCAACCUGAUCGC |
| | | CCUGUCCCUGGGCCUGACCCCCAACUUCAAGUCCAACUUCGACCUGGCCGAGGACGCCAAGCUGCAGCUGUCCAAGGACACCUACGACGAC |
| | | GACCUGGACAACCUGCUGGCCCAGAUCGGCGACCAGUACGCCGACCUGUUCCUGGCCGCCAAGAACCUGUCCGACGCCAUCCUGCUGUCCG |
| | | ACAUCCUGCGGGUGAACACCGAGAUCACCAAGGCCCCCCUGUCCGCCUCCAUGAUCAAGCGGUACGACGAGCACCACCAGGACCUGACCCU |
| | | GCUGAAGGCCCUGGUGCGGCAGCAGCUGCCCGAGAAGUACAAGGAGAUCUUCUUCGACCAGUCCAAGAACGGCUACGCCGGCUACAUCGAC |
| | | GGCGGCGCCUCCCAGGAGGAGUUCUACAAGUUCAUCAAGCCCAUCCUGGAGAAGAUGGACGGCACCGAGGAGCUGCUGGUGAAGCUGAACC |
| | | GGGAGGACCUGCUGCGGAAGCAGCGGACCUUCGACAACGGCUCCAUCCCCCACCAGAUCCACCUGGGCGAGCUGCACGCCAUCCUGCGGCG |
| | | GCAGGAGGACUUCUACCCCUUCCUGAAGGACAACCGGGAGAAGAUCGAGAAGAUCCUGACCUUCCGGAUCCCCUACUACGUGGGCCCCCUG |
| | | GCCCGGGGCAACUCCCGGUUCGCCUGGAUGACCCGGAAGUCCGAGGAGACCAUCACCCCCUGGAACUUCGAGGAGGUGGUGGACAAGGGCG |
| | | CCUCCGCCCAGUCCUUCAUCGAGCGGAUGACCAACUUCGACAAGAACCUGCCCAACGAGAAGGUGCUGCCCAAGCACUCCCUGCUGUACGA |
| | | GUACUUCACCGUGUACAACGAGCUGACCAAGGUGAAGUACGUGACCGAGGGCAUGCGGAAGCCCGCCUUCCUGUCCGGCGAGCAGAAGAAG |
| | | GCCAUCGUGGACCUGCUGUUCAAGACCAACCGGAAGGUGACCGUGAAGCAGCUGAAGGAGGACUACUUCAAGAAGAUCGAGUGCUUCGACU |
| | | CCGUGGAGAUCUCCGGCGUGGAGGACCGGUUCAACGCCUCCCUGGGCACCUACCACGACCUGCUGAAGAUCAUCAAGGACAAGGACUUCCU |
| | | GGACAACGAGGAGAACGAGGACAUCCUGGAGGACAUCGUGCUGACCCUGACCCUGUUCGAGGACCGGGAGAUGAUCGAGGAGCGGCUGAAG |
| | | ACCUACGCCCACCUGUUCGACGACAAGGUGAUGAAGCAGCUGAAGCGGCGGCGGUACACCGGCUGGGGCCGGCUGUCCCGGAAGCUGAUCA |
| | | ACGGCAUCCGGGACAAGCAGUCCGGCAAGACCAUCCUGGACUUCCUGAAGUCCGACGGCUUCGCCAACCGGAACUUCAUGCAGCUGAUCCA |
| | | CGACGACUCCCUGACCUUCAAGGAGGACAUCCAGAAGGCCCAGGUGUCCGGCCAGGGCGACUCCCUGCACGAGCACAUCGCCAACCUGGCC |
| | | GGCUCCCCCGCCAUCAAGAAGGGCAUCCUGCAGACCGUGAAGGUGGUGGACGAGCUGGUGAAGGUGAUGGGCCGGCACAAGCCCGAGAACA |
| | | UCGUGAUCGAGAUGGCCCGGGAGAACCAGACCACCCAGAAGGGCCAGAAGAACUCCCGGGAGCGGAUGAAGCGGAUCGAGGAGGGCAUCAA |
| | | GGAGCUGGGCUCCCAGAUCCUGAAGGAGCACCCCGUGGAGAACACCCAGCUGCAGAACGAGAAGCUGUACCUGUACUACCUGCAGAACGGC |
| | | CGGGACAUGUACGUGGACCAGGAGCUGGACAUCAACCGGCUGUCCGACUACGACGUGGACCACAUCGUGCCCCAGUCCUUCCUGAAGGACG |
| | | ACUCCAUCGACAACAAGGUGCUGACCCGGUCCGACAAGAACCGGGGCAAGUCCGACAACGUGCCCUCCGAGGAGGUGGUGAAGAAGAUGAA |
| | | GAACUACUGGCGGCAGCUGCUGAACGCCAAGCUGAUCACCCAGCGGAAGUUCGACAACCUGACCAAGGCCGAGCGGGGCGGCCUGUCCGAG |
| | | CUGGACAAGGCCGGCUUCAUCAAGCGGCAGCUGGUGGAGACCCGGCAGAUCACCAAGCACGUGGCCCAGAUCCUGGACUCCCGGAUGAACA |
| | | CCAAGUACGACGAGAACGACAAGCUGAUCCGGGAGGUGAAGGUGAUCACCCUGAAGUCCAAGCUGGUGUCCGACUUCCGGAAGGACUUCCA |
| | | GUUCUACAAGGUGCGGGAGAUCAACAACUACCACCACGCCCACGACGCCUACCUGAACGCCGUGGUGGGCACCGCCCUGAUCAAGAAGUAC |
| | | CCCAAGCUGGAGUCCGAGUUCGUGUACGGCGACUACAAGGUGUACGACGUGCGGAAGAUGAUCGCCAAGUCCGAGCAGGAGAUCGGCAAGG |
| | | CCACCGCCAAGUACUUCUUCUACUCCAACAUCAUGAACUUCUUCAAGACCGAGAUCACCCUGGCCAACGGCGAGAUCCGGAAGCGGCCCCU |
| | | GAUCGAGACCAACGGCGAGACCGGCGAGAUCGUGUGGGACAAGGGCCGGGACUUCGCCACCGUGCGGAAGGUGCUGUCCAUGCCCCAGGUG |
| | | AACAUCGUGAAGAAGACCGAGGUGCAGACCGGCGGCUUCUCCAAGGAGUCCAUCCUGCCCAAGCGGAACUCCGACAAGCUGAUCGCCCGGA |
| | | AGAAGGACUGGGACCCCAAGAAGUACGGCGGCUUCGACUCCCCCACCGUGGCCUACUCCGUGCUGGUGGUGGCCAAGGUGGAGAAGGGCAA |
| | | GUCCAAGAAGCUGAAGUCCGUGAAGGAGCUGCUGGGCAUCACCAUCAUGGAGCGGUCCUCCUUCGAGAAGAACCCCAUCGACUUCCUGGAG |
| | | GCCAAGGGCUACAAGGAGGUGAAGAAGGACCUGAUCAUCAAGCUGCCCAAGUACUCCCUGUUCGAGCUGGAGAACGGCCGGAAGCGGAUGC |
| | | UGGCCUCCGCCGGCGAGCUGCAGAAGGGCAACGAGCUGGCCCUGCCCUCCAAGUACGUGAACUUCCUGUACCUGGCCUCCCACUACGAGAA |
| | | GCUGAAGGGCUCCCCCGAGGACAACGAGCAGAAGCAGCUGUUCGUGGAGCAGCACAAGCACUACCUGGACGAGAUCAUCGAGCAGAUCUCC |
| | | GAGUUCUCCAAGCGGGUGAUCCUGGCCGACGCCAACCUGGACAAGGUGCUGUCCGCCUACAACAAGCACCGGGACAAGCCCAUCCGGGAGC |
| | | AGGCCGAGAACAUCAUCCACCUGUUCACCCUGACCAACCUGGGCGCCCCCGCCGCCUUCAAGUACUUCGACACCACCAUCGACAAGAAGCG |
| | | GUACACCUCCACCAAGGAGGUGCUGGACGCCACCCUGAUCCACCAGUCCAUCACCGGCCUGUACGAGACCCGGAUCGACCUGUCCCAGCUG |
| | | GGCGGCGACGGCGCCCCCGAGUCCGCCACCGAGUCCGGCGGCACCUCCACCGAGUCCGAGGGCUCCGCCGGCACCUCCACCGAGUCCGAGG |
| | | GCUCCGCCGGCUCCGCCGGCUCCACCUCCGGCGGCUCCGGCGGCGGCUCCGGCGGCUCCGGCUCCGCCGGCACCUCCACCGAGUCCGAGGG |
| | | CUCCGCCGGCACCUCCGAGUCCGCCACCGAGUCCGGCGGCACCUCCACCGAGUCCGAGGGCUCCUCCUCCGGCGCCGCCUUCAAGCCCAAC |
| | | CCCAUCAACUACAUCCUGGGCCUGGACAUCGGCAUCGCCUCCGUGGGCUGGGCCAUGGUGGAGAUCGACGAGGAGGAGAACCCCAUCCGGC |
| | | UGAUCGACCUGGGCGUGCGGGUGUUCGAGCGGGCCGAGGUGCCCAAGACCGGCGACUCCCUGGCCAUGGCCCGGCGGCUGGCCCGGUCCGU |
| | | GCGGCGGCUGACCCGGCGGCGGGCCCACCGGCUGCUGCGGGCCCGGCGGCUGCUGAAGCGGGAGGGCGUGCUGCAGGCCGCCGACUUCGAC |
| | | GAGAACGGCCUGAUCAAGUCCCUGCCCAACACCCCCUGGCAGCUGCGGGCCGCCGCCCUGGACCGGAAGCUGACCCCCCUGGAGUGGUCCG |
| | | CCGUGCUGCUGCACCUGAUCAAGCACCGGGGCUACCUGUCCCAGCGGAAGAACGAGGGCGAGACCGCCGACAAGGAGCUGGGCGCCCUGCU |
| | | GAAGGGCGUGGCCAACAACGCCCACGCCCUGCAGACCGGCGACUUCCGGACCCCCGCCGAGCUGGCCCUGAACAAGUUCGAGAAGGAGUCC |
| | | GGCCACAUCCGGAACCAGCGGGGCGACUACUCCCACACCUUCUCCCGGAAGGACCUGCAGGCCGAGCUGAUCCUGCUGUUCGAGAAGCAGA |
| | | AGGAGUUCGGCAACCCCCACGUGUCCGGCGGCCUGAAGGAGGGCAUCGAGACCCUGCUGAUGACCCAGCGGCCCGCCCUGUCCGGCGACGC |
| | | CGUGCAGAAGAUGCUGGGCCACUGCACCUUCGAGCCCGCCGAGCCCAAGGCCGCCAAGAACACCUACACCGCCGAGCGGUUCAUCUGGCUG |
| | | ACCAAGCUGAACAACCUGCGGAUCCUGGAGCAGGGCUCCGAGCGGCCCCUGACCGACACCGAGCGGGCCACCCUGAUGGACGAGCCCUACC |
| | | GGAAGUCCAAGCUGACCUACGCCCAGGCCCGGAAGCUGCUGGGCCUGGAGGACACCGCCUUCUUCAAGGGCCUGCGGUACGGCAAGGACAA |
| | | CGCCGAGGCCUCCACCCUGAUGGAGAUGAAGGCCUACCACGCCAUCUCCCGGGCCCUGGAGAAGGAGGGCCUGAAGGACAAGAAGUCCCCC |
| | | CUGAACCUGUCCUCCGAGCUGCAGGACGAGAUCGGCACCGCCUUCUCCCUGUUCAAGACCGACGAGGACAUCACCGGCCGGCUGAAGGACC |
| | | GGGUGCAGCCCGAGAUCCUGGAGGCCCUGCUGAAGCACAUCUCCUUCGACAAGUUCGUGCAGAUCUCCCUGAAGGCCCUGCGGCGGAUCGU |
| | | GCCCCUGAUGGAGCAGGGCAAGCGGUACGACGAGGCCUGCGCCGAGAUCUACGGCGACCACUACGGCAAGAAGAACACCGAGGAGAAGAUC |
| | | UACCUGCCCCCCAUCCCCGCCGACGAGAUCCGGAACCCCGUGGUGCUGCGGGCCCUGUCCCAGGCCCGGAAGGUGAUCAACGGCGUGGUGC |
| | | GGCGGUACGGCUCCCCCGCCCGGAUCCACAUCGAGACCGCCCGGGAGGUGGGCAAGUCCUUCAAGGACCGGAAGGAGAUCGAGAAGCGGCA |
| | | GGAGGAGAACCGGAAGGACCGGGAGAAGGCCGCCGCCAAGUUCCGGGAGUACUUCCCCAACUUCGUGGGCGAGCCCAAGUCCAAGGACAUC |
| | | CUGAAGCUGCGGCUGUACGAGCAGCAGCACGGCAAGUGCCUGUACUCCGGCAAGGAGAUCAACCUGGUGCGGCUGAACGAGAAGGGCUACG |
| | | UGGAGAUCGACCACGCCCUGCCCUUCUCCCGGACCUGGGACGACUCCUUCAACAACAAGGUGCUGGUGCUGGGCUCCGAGAACCAGAACAA |
| | | GGGCAACCAGACCCCCUACGAGUACUUCAACGGCAAGGACAACUCCCGGGAGUGGCAGGAGUUCAAGGCCCGGGUGGAGACCUCCCGGUUC |
| | | CCCCGGUCCAAGAAGCAGCGGAUCCUGCUGCAGAAGUUCGACGAGGACGGCUUCAAGGAGUGCAACCUGAACGACACCCGGUACGUGAACC |
| | | GGUUCCUGUGCCAGUUCGUGGCCGACCACAUCCUGCUGACCGGCAAGGGCAAGCGGCGGGUGUUCGCCUCCAACGGCCAGAUCACCAACCU |
| | | GCUGCGGGGCUUCUGGGGCCUGCGGAAGGUGCGGGCCGAGAACGACCGGCACCACGCCCUGGACGCCGUGGUGGUGGCCUGCUCCACCGUG |
| | | GCCAUGCAGCAGAAGAUCACCCGGUUCGUGCGGUACAAGGAGAUGAACGCCUUCGACGGCAAGACCAUCGACAAGGAGACCGGCAAGGUGC |
| | | UGCACCAGAAGACCCACUUCCCCCAGCCCUGGGAGUUCUUCGCCCAGGAGGUGAUGAUCCGGGUGUUCGGCAAGCCCGACGGCAAGCCCGA |
| | | GUUCGAGGAGGCCGACACCCCCGAGAAGCUGCGGACCCUGCUGGCCGAGAAGCUGUCCUCCCGGCCCGAGGCCGUGCACGAGUACGUGACC |
| | | CCCCUGUUCGUGUCCCGGGCCCCCAACCGGAAGAUGUCCGGCGCCCACAAGGACACCCUGCGGUCCGCCAAGCGGUUCGUGAAGCACAACG |
| | | AGAAGAUCUCCGUGAAGCGGGUGUGGCUGACCGAGAUCAAGCUGGCCGACCUGGAGAACAUGGUGAACUACAAGAACGGCCGGGAGAUCGA |
| | | GCUGUACGAGGCCCUGAAGGCCCGGCUGGAGGCCUACGGCGGCAACGCCAAGCAGGCCUUCGACCCCAAGGACAACCCCUUCUACAAGAAG |
| | | GGCGGCCAGCUGGUGAAGGCCGUGCGGGUGGAGAAGACCCAGGAGUCCGGCGUGCUGCUGAACAAGAAGAACGCCUACACCAUCGCCGACA |
| | | ACGGCGACAUGGUGCGGGUGGACGUGUUCUGCAAGGUGGACAAGAAGGGCAAGAACCAGUACUUCAUCGUGCCCAUCUACGCCUGGCAGGU |
| | | GGCCGAGAACAUCCUGCCCGACAUCGACUGCAAGGGCUACCGGAUCGACGACUCCUACACCUUCUGCUUCUCCCUGCACAAGUACGACCUG |
| | | AUCGCCUUCCAGAAGGACGAGAAGUCCAAGGUGGAGUUCGCCUACUACAUCAACUGCGACUCCUCCAACGGCCGGUUCUACCUGGCCUGGC |
| | | ACGACAAGGGCUCCAAGGAGCAGCAGUUCCGGAUCUCCACCCAGAACCUGGUGCUGAUCCAGAAGUACCAGGUGAACGAGCUGGGCAAGGA |
| | | GAUCCGGCCCUGCCGGCUGAAGAAGCGGCCCCCCGUGCGGUCCGGCAAGCGGACCGCCGACGGCUCCGGCGGCGGCUCCCCCAAGAAGAAG |
| | | CGGAAGGUGGAGUAG |
| 40 | Cas9- | MDKKYSIGLDIGTNSVGWAVITDEYKVPSKKFKVLGNTDRHSIKKNLIGALLFDSGETAEATRLKRTARRRYTRRKNRICYLQEIFSNEMA |
| | Cas9 | KVDDSFFHRLEESFLVEEDKKHERHPIFGNIVDEVAYHEKYPTIYHLRKKLVDSTDKADLRLIYLALAHMIKFRGHFLIEGDLNPDNSDVD |
| | fusion | KLFIQLVQTYNQLFEENPINASGVDAKAILSARLSKSRRLENLIAQLPGEKKNGLFGNLIALSLGLTPNFKSNFDLAEDAKLQLSKDTYDD |
| | (mRNA L)- | DLDNLLAQIGDQYADLFLAAKNLSDAILLSDILRVNTEITKAPLSASMIKRYDEHHQDLTLLKALVRQQLPEKYKEIFFDQSKNGYAGYID |
| | amino | GGASQEEFYKFIKPILEKMDGTEELLVKLNREDLLRKQRTFDNGSIPHQIHLGELHAILRRQEDFYPFLKDNREKIEKILTFRIPYYVGPL |
| | acid | ARGNSRFAWMTRKSEETITPWNFEEVVDKGASAQSFIERMTNFDKNLPNEKVLPKHSLLYEYFTVYNELTKVKYVTEGMRKPAFLSGEQKK |
| | sequence | AIVDLLFKTNRKVTVKQLKEDYFKKIECFDSVEISGVEDRFNASLGTYHDLLKIIKDKDFLDNEENEDILEDIVLTLTLFEDREMIEERLK |
| | | TYAHLFDDKVMKQLKRRRYTGWGRLSRKLINGIRDKQSGKTILDFLKSDGFANRNFMQLIHDDSLTFKEDIQKAQVSGQGDSLHEHIANLA |
| | | GSPAIKKGILQTVKVVDELVKVMGRHKPENIVIEMARENQTTQKGQKNSRERMKRIEEGIKELGSQILKEHPVENTQLQNEKLYLYYLQNG |
| | | RDMYVDQELDINRLSDYDVDHIVPQSFLKDDSIDNKVLTRSDKNRGKSDNVPSEEVVKKMKNYWRQLLNAKLITQRKFDNLTKAERGGLSE |
| | | LDKAGFIKRQLVETRQITKHVAQILDSRMNTKYDENDKLIREVKVITLKSKLVSDFRKDFQFYKVREINNYHHAHDAYLNAVVGTALIKKY |
| | | PKLESEFVYGDYKVYDVRKMIAKSEQEIGKATAKYFFYSNIMNFFKTEITLANGEIRKRPLIETNGETGEIVWDKGRDFATVRKVLSMPQV |
| | | NIVKKTEVQTGGFSKESILPKRNSDKLIARKKDWDPKKYGGFDSPTVAYSVLVVAKVEKGKSKKLKSVKELLGITIMERSSFEKNPIDFLE |
| | | AKGYKEVKKDLIIKLPKYSLFELENGRKRMLASAGELQKGNELALPSKYVNFLYLASHYEKLKGSPEDNEQKQLFVEQHKHYLDEIIEQIS |
| | | EFSKRVILADANLDKVLSAYNKHRDKPIREQAENIIHLFTLTNLGAPAAFKYFDTTIDKKRYTSTKEVLDATLIHQSITGLYETRIDLSQL |
| | | GGDGAPESATESGGTSTESEGSAGTSTESEGSAGSAGSTSGGSGGGSGGSGSAGTSTESEGSAGTSESATESGGTSTESEGSSSGAAFKPN |
| | | PINYILGLDIGIASVGWAMVEIDEEENPIRLIDLGVRVFERAEVPKTGDSLAMARRLARSVRRLTRRRAHRLLRARRLLKREGVLQAADFD |
| | | ENGLIKSLPNTPWQLRAAALDRKLTPLEWSAVLLHLIKHRGYLSQRKNEGETADKELGALLKGVANNAHALQTGDFRTPAELALNKFEKES |
| | | GHIRNQRGDYSHTFSRKDLQAELILLFEKQKEFGNPHVSGGLKEGIETLLMTQRPALSGDAVQKMLGHCTFEPAEPKAAKNTYTAERFIWL |
| | | TKLNNLRILEQGSERPLTDTERATLMDEPYRKSKLTYAQARKLLGLEDTAFFKGLRYGKDNAEASTLMEMKAYHAISRALEKEGLKDKKSP |
| | | LNLSSELQDEIGTAFSLFKTDEDITGRLKDRVQPEILEALLKHISFDKFVQISLKALRRIVPLMEQGKRYDEACAEIYGDHYGKKNTEEKI |
| | | YLPPIPADEIRNPVVLRALSQARKVINGVVRRYGSPARIHIETAREVGKSFKDRKEIEKRQEENRKDREKAAAKFREYFPNFVGEPKSKDI |
| | | LKLRLYEQQHGKCLYSGKEINLVRLNEKGYVEIDHALPFSRTWDDSFNNKVLVLGSENQNKGNQTPYEYFNGKDNSREWQEFKARVETSRF |
| | | PRSKKQRILLQKFDEDGFKECNLNDTRYVNRFLCQFVADHILLTGKGKRRVFASNGQITNLLRGFWGLRKVRAENDRHHALDAVVVACSTV |
| | | AMQQKITRFVRYKEMNAFDGKTIDKETGKVLHQKTHFPQPWEFFAQEVMIRVFGKPDGKPEFEEADTPEKLRTLLAEKLSSRPEAVHEYVT |
| | | PLFVSRAPNRKMSGAHKDTLRSAKRFVKHNEKISVKRVWLTEIKLADLENMVNYKNGREIELYEALKARLEAYGGNAKQAFDPKDNPFYKK |
| | | GGQLVKAVRVEKTQESGVLLNKKNAYTIADNGDMVRVDVFCKVDKKGKNQYFIVPIYAWQVAENILPDIDCKGYRIDDSYTFCFSLHKYDL |
| | | IAFQKDEKSKVEFAYYINCDSSNGRFYLAWHDKGSKEQQFRISTQNLVLIQKYQVNELGKEIRPCRLKKRPPVRSGKRTADGSGGGSPKKK |
| | | RKVE* |
| 41 | Cas9- | GGGAAGCUCAGAAUAAACGCUCAACUUUGGCCGGAUCUGCCACCAUGGACAAGAAGUACUCCAUCGGCCUGGACAUCGGCACCAACUCCGU |
| | Cas9 | GGGCUGGGCCGUGAUCACCGACGAGUACAAGGUGCCCUCCAAGAAGUUCAAGGUGCUGGGCAACACCGACCGGCACUCCAUCAAGAAGAAC |
| | fusion | CUGAUCGGCGCCCUGCUGUUCGACUCCGGCGAGACCGCCGAGGCCACCCGGCUGAAGCGGACCGCCCGGCGGCGGUACACCCGGCGGAAGA |
| | with | ACCGGAUCUGCUACCUGCAGGAGAUCUUCUCCAACGAGAUGGCCAAGGUGGACGACUCCUUCUUCCACCGGCUGGAGGAGUCCUUCCUGGU |
| | HiBit | GGAGGAGGACAAGAAGCACGAGCGGCACCCCAUCUUCGGCAACAUCGUGGACGAGGUGGCCUACCACGAGAAGUACCCCACCAUCUACCAC |
| | tag | CUGCGGAAGAAGCUGGUGGACUCCACCGACAAGGCCGACCUGCGGCUGAUCUACCUGGCCCUGGCCCACAUGAUCAAGUUCCGGGGCCACU |
| | (mRNA M)- | UCCUGAUCGAGGGCGACCUGAACCCCGACAACUCCGACGUGGACAAGCUGUUCAUCCAGCUGGUGCAGACCUACAACCAGCUGUUCGAGGA |
| | mRNA | GAACCCCAUCAACGCCUCCGGCGUGGACGCCAAGGCCAUCCUGUCCGCCCGGCUGUCCAAGUCCCGGCGGCUGGAGAACCUGAUCGCCCAG |
| | sequence | CUGCCCGGCGAGAAGAAGAACGGCCUGUUCGGCAACCUGAUCGCCCUGUCCCUGGGCCUGACCCCCAACUUCAAGUCCAACUUCGACCUGG |
| | | CCGAGGACGCCAAGCUGCAGCUGUCCAAGGACACCUACGACGACGACCUGGACAACCUGCUGGCCCAGAUCGGCGACCAGUACGCCGACCU |
| | | GUUCCUGGCCGCCAAGAACCUGUCCGACGCCAUCCUGCUGUCCGACAUCCUGCGGGUGAACACCGAGAUCACCAAGGCCCCCCUGUCCGCC |
| | | UCCAUGAUCAAGCGGUACGACGAGCACCACCAGGACCUGACCCUGCUGAAGGCCCUGGUGCGGCAGCAGCUGCCCGAGAAGUACAAGGAGA |
| | | UCUUCUUCGACCAGUCCAAGAACGGCUACGCCGGCUACAUCGACGGCGGCGCCUCCCAGGAGGAGUUCUACAAGUUCAUCAAGCCCAUCCU |
| | | GGAGAAGAUGGACGGCACCGAGGAGCUGCUGGUGAAGCUGAACCGGGAGGACCUGCUGCGGAAGCAGCGGACCUUCGACAACGGCUCCAUC |
| | | CCCCACCAGAUCCACCUGGGCGAGCUGCACGCCAUCCUGCGGCGGCAGGAGGACUUCUACCCCUUCCUGAAGGACAACCGGGAGAAGAUCG |
| | | AGAAGAUCCUGACCUUCCGGAUCCCCUACUACGUGGGCCCCCUGGCCCGGGGCAACUCCCGGUUCGCCUGGAUGACCCGGAAGUCCGAGGA |
| | | GACCAUCACCCCCUGGAACUUCGAGGAGGUGGUGGACAAGGGCGCCUCCGCCCAGUCCUUCAUCGAGCGGAUGACCAACUUCGACAAGAAC |
| | | CUGCCCAACGAGAAGGUGCUGCCCAAGCACUCCCUGCUGUACGAGUACUUCACCGUGUACAACGAGCUGACCAAGGUGAAGUACGUGACCG |
| | | AGGGCAUGCGGAAGCCCGCCUUCCUGUCCGGCGAGCAGAAGAAGGCCAUCGUGGACCUGCUGUUCAAGACCAACCGGAAGGUGACCGUGAA |
| | | GCAGCUGAAGGAGGACUACUUCAAGAAGAUCGAGUGCUUCGACUCCGUGGAGAUCUCCGGCGUGGAGGACCGGUUCAACGCCUCCCUGGGC |
| | | ACCUACCACGACCUGCUGAAGAUCAUCAAGGACAAGGACUUCCUGGACAACGAGGAGAACGAGGACAUCCUGGAGGACAUCGUGCUGACCC |
| | | UGACCCUGUUCGAGGACCGGGAGAUGAUCGAGGAGCGGCUGAAGACCUACGCCCACCUGUUCGACGACAAGGUGAUGAAGCAGCUGAAGCG |
| | | GCGGCGGUACACCGGCUGGGGCCGGCUGUCCCGGAAGCUGAUCAACGGCAUCCGGGACAAGCAGUCCGGCAAGACCAUCCUGGACUUCCUG |
| | | AAGUCCGACGGCUUCGCCAACCGGAACUUCAUGCAGCUGAUCCACGACGACUCCCUGACCUUCAAGGAGGACAUCCAGAAGGCCCAGGUGU |
| | | CCGGCCAGGGCGACUCCCUGCACGAGCACAUCGCCAACCUGGCCGGCUCCCCCGCCAUCAAGAAGGGCAUCCUGCAGACCGUGAAGGUGGU |
| | | GGACGAGCUGGUGAAGGUGAUGGGCCGGCACAAGCCCGAGAACAUCGUGAUCGAGAUGGCCCGGGAGAACCAGACCACCCAGAAGGGCCAG |
| | | AAGAACUCCCGGGAGCGGAUGAAGCGGAUCGAGGAGGGCAUCAAGGAGCUGGGCUCCCAGAUCCUGAAGGAGCACCCCGUGGAGAACACCC |
| | | AGCUGCAGAACGAGAAGCUGUACCUGUACUACCUGCAGAACGGCCGGGACAUGUACGUGGACCAGGAGCUGGACAUCAACCGGCUGUCCGA |
| | | CUACGACGUGGACCACAUCGUGCCCCAGUCCUUCCUGAAGGACGACUCCAUCGACAACAAGGUGCUGACCCGGUCCGACAAGAACCGGGGC |
| | | AAGUCCGACAACGUGCCCUCCGAGGAGGUGGUGAAGAAGAUGAAGAACUACUGGCGGCAGCUGCUGAACGCCAAGCUGAUCACCCAGCGGA |
| | | AGUUCGACAACCUGACCAAGGCCGAGCGGGGCGGCCUGUCCGAGCUGGACAAGGCCGGCUUCAUCAAGCGGCAGCUGGUGGAGACCCGGCA |
| | | GAUCACCAAGCACGUGGCCCAGAUCCUGGACUCCCGGAUGAACACCAAGUACGACGAGAACGACAAGCUGAUCCGGGAGGUGAAGGUGAUC |
| | | ACCCUGAAGUCCAAGCUGGUGUCCGACUUCCGGAAGGACUUCCAGUUCUACAAGGUGCGGGAGAUCAACAACUACCACCACGCCCACGACG |
| | | CCUACCUGAACGCCGUGGUGGGCACCGCCCUGAUCAAGAAGUACCCCAAGCUGGAGUCCGAGUUCGUGUACGGCGACUACAAGGUGUACGA |
| | | CGUGCGGAAGAUGAUCGCCAAGUCCGAGCAGGAGAUCGGCAAGGCCACCGCCAAGUACUUCUUCUACUCCAACAUCAUGAACUUCUUCAAG |
| | | ACCGAGAUCACCCUGGCCAACGGCGAGAUCCGGAAGCGGCCCCUGAUCGAGACCAACGGCGAGACCGGCGAGAUCGUGUGGGACAAGGGCC |
| | | GGGACUUCGCCACCGUGCGGAAGGUGCUGUCCAUGCCCCAGGUGAACAUCGUGAAGAAGACCGAGGUGCAGACCGGCGGCUUCUCCAAGGA |
| | | GUCCAUCCUGCCCAAGCGGAACUCCGACAAGCUGAUCGCCCGGAAGAAGGACUGGGACCCCAAGAAGUACGGCGGCUUCGACUCCCCCACC |
| | | GUGGCCUACUCCGUGCUGGUGGUGGCCAAGGUGGAGAAGGGCAAGUCCAAGAAGCUGAAGUCCGUGAAGGAGCUGCUGGGCAUCACCAUCA |
| | | UGGAGCGGUCCUCCUUCGAGAAGAACCCCAUCGACUUCCUGGAGGCCAAGGGCUACAAGGAGGUGAAGAAGGACCUGAUCAUCAAGCUGCC |
| | | CAAGUACUCCCUGUUCGAGCUGGAGAACGGCCGGAAGCGGAUGCUGGCCUCCGCCGGCGAGCUGCAGAAGGGCAACGAGCUGGCCCUGCCC |
| | | UCCAAGUACGUGAACUUCCUGUACCUGGCCUCCCACUACGAGAAGCUGAAGGGCUCCCCCGAGGACAACGAGCAGAAGCAGCUGUUCGUGG |
| | | AGCAGCACAAGCACUACCUGGACGAGAUCAUCGAGCAGAUCUCCGAGUUCUCCAAGCGGGUGAUCCUGGCCGACGCCAACCUGGACAAGGU |
| | | GCUGUCCGCCUACAACAAGCACCGGGACAAGCCCAUCCGGGAGCAGGCCGAGAACAUCAUCCACCUGUUCACCCUGACCAACCUGGGCGCC |
| | | CCCGCCGCCUUCAAGUACUUCGACACCACCAUCGACAAGAAGCGGUACACCUCCACCAAGGAGGUGCUGGACGCCACCCUGAUCCACCAGU |
| | | CCAUCACCGGCCUGUACGAGACCCGGAUCGACCUGUCCCAGCUGGGGGGCGACGGCGCCCCCGAGUCCGCCACCGAGUCCGGCGGCACCUC |
| | | CACCGAGUCCGAGGGCUCCGCCGGCACCUCCACCGAGUCCGAGGGCUCCGCCGGCUCCGCCGGCUCCACCUCCACCGAGGAGGGCACCUCC |
| | | ACCGAGUCCGAGGGCUCCGCCGGCACCUCCACCGAGUCCGAGGGCUCCGCCGGCACCUCCGAGUCCGCCACCGAGUCCGGCGGCACCUCCA |
| | | CCGAGUCCGAGGGCUCCUCCUCCGGUGCCGCCUUCAAGCCCAACCCCAUCAACUACAUCCUGGGCCUGGACAUCGGCAUCGCCUCCGUGGG |
| | | CUGGGCCAUGGUGGAGAUCGACGAGGAGGAGAACCCCAUCCGGCUGAUCGACCUGGGCGUGCGGGUGUUCGAGCGGGCCGAGGUGCCCAAG |
| | | ACCGGCGACUCCCUGGCCAUGGCCCGGCGGCUGGCCCGGUCCGUGCGGCGGCUGACCCGGCGGCGGGCCCACCGGCUGCUGCGGGCCCGGC |
| | | GGCUGCUGAAGCGGGAGGGCGUGCUGCAGGCCGCCGACUUCGACGAGAACGGCCUGAUCAAGUCCCUGCCCAACACCCCCUGGCAGCUGCG |
| | | GGCCGCCGCCCUGGACCGGAAGCUGACCCCCCUGGAGUGGUCCGCCGUGCUGCUGCACCUGAUCAAGCACCGGGGCUACCUGUCCCAGCGG |
| | | AAGAACGAGGGCGAGACCGCCGACAAGGAGCUGGGCGCCCUGCUGAAGGGCGUGGCCAACAACGCCCACGCCCUGCAGACCGGCGACUUCC |
| | | GGACCCCCGCCGAGCUGGCCCUGAACAAGUUCGAGAAGGAGUCCGGCCACAUCCGGAACCAGCGGGGCGACUACUCCCACACCUUCUCCCG |
| | | GAAGGACCUGCAGGCCGAGCUGAUCCUGCUGUUCGAGAAGCAGAAGGAGUUCGGCAACCCCCACGUGUCCGGCGGCCUGAAGGAGGGCAUC |
| | | GAGACCCUGCUGAUGACCCAGCGGCCCGCCCUGUCCGGCGACGCCGUGCAGAAGAUGCUGGGCCACUGCACCUUCGAGCCCGCCGAGCCCA |
| | | AGGCCGCCAAGAACACCUACACCGCCGAGCGGUUCAUCUGGCUGACCAAGCUGAACAACCUGCGGAUCCUGGAGCAGGGCUCCGAGCGGCC |
| | | CCUGACCGACACCGAGCGGGCCACCCUGAUGGACGAGCCCUACCGGAAGUCCAAGCUGACCUACGCCCAGGCCCGGAAGCUGCUGGGCCUG |
| | | GAGGACACCGCCUUCUUCAAGGGCCUGCGGUACGGCAAGGACAACGCCGAGGCCUCCACCCUGAUGGAGAUGAAGGCCUACCACGCCAUCU |
| | | CCCGGGCCCUGGAGAAGGAGGGCCUGAAGGACAAGAAGUCCCCCCUGAACCUGUCCUCCGAGCUGCAGGACGAGAUCGGCACCGCCUUCUC |
| | | CCUGUUCAAGACCGACGAGGACAUCACCGGCCGGCUGAAGGACCGGGUGCAGCCCGAGAUCCUGGAGGCCCUGCUGAAGCACAUCUCCUUC |
| | | GACAAGUUCGUGCAGAUCUCCCUGAAGGCCCUGCGGCGGAUCGUGCCCCUGAUGGAGCAGGGCAAGCGGUACGACGAGGCCUGCGCCGAGA |
| | | UCUACGGCGACCACUACGGCAAGAAGAACACCGAGGAGAAGAUCUACCUGCCCCCCAUCCCCGCCGACGAGAUCCGGAACCCCGUGGUGCU |
| | | GCGGGCCCUGUCCCAGGCCCGGAAGGUGAUCAACGGCGUGGUGCGGCGGUACGGCUCCCCCGCCCGGAUCCACAUCGAGACCGCCCGGGAG |
| | | GUGGGCAAGUCCUUCAAGGACCGGAAGGAGAUCGAGAAGCGGCAGGAGGAGAACCGGAAGGACCGGGAGAAGGCCGCCGCCAAGUUCCGGG |
| | | AGUACUUCCCCAACUUCGUGGGCGAGCCCAAGUCCAAGGACAUCCUGAAGCUGCGGCUGUACGAGCAGCAGCACGGCAAGUGCCUGUACUC |
| | | CGGCAAGGAGAUCAACCUGGUGCGGCUGAACGAGAAGGGCUACGUGGAGAUCGACCACGCCCUGCCCUUCUCCCGGACCUGGGACGACUCC |
| | | UUCAACAACAAGGUGCUGGUGCUGGGCUCCGAGAACCAGAACAAGGGCAACCAGACCCCCUACGAGUACUUCAACGGCAAGGACAACUCCC |
| | | GGGAGUGGCAGGAGUUCAAGGCCCGGGUGGAGACCUCCCGGUUCCCCCGGUCCAAGAAGCAGCGGAUCCUGCUGCAGAAGUUCGACGAGGA |
| | | CGGCUUCAAGGAGUGCAACCUGAACGACACCCGGUACGUGAACCGCUUCCUGUGCCAGUUCGUGGCCGACCACAUCCUGCUGACCGGCAAG |
| | | GGCAAGCGGCGGGUGUUCGCCUCCAACGGCCAGAUCACCAACCUGCUGCGGGGCUUCUGGGGCCUGCGGAAGGUGCGGGCCGAGAACGACC |
| | | GGCACCACGCCCUGGACGCCGUGGUGGUGGCCUGCUCCACCGUGGCCAUGCAGCAGAAGAUCACCCGGUUCGUGCGGUACAAGGAGAUGAA |
| | | CGCCUUCGACGGCAAGACCAUCGACAAGGAGACCGGCAAGGUGCUGCACCAGAAGACCCACUUCCCCCAGCCCUGGGAGUUCUUCGCCCAG |
| | | GAGGUGAUGAUCCGGGUGUUCGGCAAGCCCGACGGCAAGCCCGAGUUCGAGGAGGCCGACACCCCCGAGAAGCUGCGGACCCUGCUGGCCG |
| | | AGAAGCUGUCCUCCCGGCCCGAGGCCGUGCACGAGUACGUGACCCCCCUGUUCGUGUCCCGGGCCCCCAACCGGAAGAUGUCCGGCGCCCA |
| | | CAAGGACACCCUGCGGUCCGCCAAGCGGUUCGUGAAGCACAACGAGAAGAUCUCCGUGAAGCGGGUGUGGCUGACCGAGAUCAAGCUGGCC |
| | | GACCUGGAGAACAUGGUGAACUACAAGAACGGCCGGGAGAUCGAGCUGUACGAGGCCCUGAAGGCCCGGCUGGAGGCCUACGGCGGCAACG |
| | | CCAAGCAGGCCUUCGACCCCAAGGACAACCCCUUCUACAAGAAGGGCGGCCAGCUGGUGAAGGCCGUGCGGGUGGAGAAGACCCAGGAGUC |
| | | CGGCGUGCUGCUGAACAAGAAGAACGCCUACACCAUCGCCGACAACGGCGACAUGGUGCGGGUGGACGUGUUCUGCAAGGUGGACAAGAAG |
| | | GGCAAGAACCAGUACUUCAUCGUGCCCAUCUACGCCUGGCAGGUGGCCGAGAACAUCCUGCCCGACAUCGACUGCAAGGGCUACCGGAUCG |
| | | ACGACUCCUACACCUUCUGCUUCUCCCUGCACAAGUACGACCUGAUCGCCUUCCAGAAGGACGAGAAGUCCAAGGUGGAGUUCGCCUACUA |
| | | CAUCAACUGCGACUCCUCCAACGGCCGGUUCUACCUGGCCUGGCACGACAAGGGCUCCAAGGAGCAGCAGUUCCGGAUCUCCACCCAGAAC |
| | | CUGGUGCUGAUCCAGAAGUACCAGGUGAACGAGCUGGGCAAGGAGAUCCGGCCCUGCCGGCUGAAGAAGCGGCCCCCCGUGCGGUCCGGAA |
| | | AGCGGACCGCCGACGGCUCCGGAGGAGGAAGCCCGAAGAAGAAGAGAAAGGUCAGCGAAAGCGCAACACCGGAAAGCGUCAGCGGAUGGAG |
| | | ACUGUUCAAGAAGAUCAGCUAGCUAGCACCAGCCUCAAGAACACCCGAAUGGAGUCUCUAAGCUACAUAAUACCAACUUACACUUUACAAA |
| | | AUGUUGUCCCCCAAAAUGUAGCCAUUCGUAUCUGCUCCUAAUAAAAAGAAAGUUUCUUCACAUUCUCUCGAGAAAAAAAAAAAAUGGAAAA |
| | | AAAAAAAACGGAAAAAAAAAAAAGGUAAAAAAAAAAAAUAUAAAAAAAAAAAACAUAAAAAAAAAAAACGAAAAAAAAAAAACGUAAAAAA |
| | | AAAAAACUCAAAAAAAAAAAAGAUAAAAAAAAAAAACCUAAAAAAAAAAAAUGUAAAAAAAAAAAAGGGAAAAAAAAAAAACGCAAAAAAA |
| | | AAAAACACAAAAAAAAAAAAUGCAAAAAAAAAAAAUCGAAAAAAAAAAAAUCUAAAAAAAAAAAACGAAAAAAAAAAAACCCAAAAAAAAA |
| | | AAAGACAAAAAAAAAAAAUAGAAAAAAAAAAAAGUUAAAAAAAAAAAACUGAAAAAAAAAAAAUUUAAAAAAAAAAAAUCUAG |
| 42 | Cas9- | AUGGACAAGAAGUACUCCAUCGGCCUGGACAUCGGCACCAACUCCGUGGGCUGGGCCGUGAUCACCGACGAGUACAAGGUGCCCUCCAAGA |
| | Cas9 | AGUUCAAGGUGCUGGGCAACACCGACCGGCACUCCAUCAAGAAGAACCUGAUCGGCGCCCUGCUGUUCGACUCCGGCGAGACCGCCGAGGC |
| | fusion | CACCCGGCUGAAGCGGACCGCCCGGCGGCGGUACACCCGGCGGAAGAACCGGAUCUGCUACCUGCAGGAGAUCUUCUCCAACGAGAUGGCC |
| | with | AAGGUGGACGACUCCUUCUUCCACCGGCUGGAGGAGUCCUUCCUGGUGGAGGAGGACAAGAAGCACGAGCGGCACCCCAUCUUCGGCAACA |
| | HiBit | UCGUGGACGAGGUGGCCUACCACGAGAAGUACCCCACCAUCUACCACCUGCGGAAGAAGCUGGUGGACUCCACCGACAAGGCCGACCUGCG |
| | tag | GCUGAUCUACCUGGCCCUGGCCCACAUGAUCAAGUUCCGGGGCCACUUCCUGAUCGAGGGCGACCUGAACCCCGACAACUCCGACGUGGAC |
| | (mRNA | AAGCUGUUCAUCCAGCUGGUGCAGACCUACAACCAGCUGUUCGAGGAGAACCCCAUCAACGCCUCCGGCGUGGACGCCAAGGCCAUCCUGU |
| | M)-ORF | CCGCCCGGCUGUCCAAGUCCCGGCGGCUGGAGAACCUGAUCGCCCAGCUGCCCGGCGAGAAGAAGAACGGCCUGUUCGGCAACCUGAUCGC |
| | sequence | CCUGUCCCUGGGCCUGACCCCCAACUUCAAGUCCAACUUCGACCUGGCCGAGGACGCCAAGCUGCAGCUGUCCAAGGACACCUACGACGAC |
| | | GACCUGGACAACCUGCUGGCCCAGAUCGGCGACCAGUACGCCGACCUGUUCCUGGCCGCCAAGAACCUGUCCGACGCCAUCCUGCUGUCCG |
| | | ACAUCCUGCGGGUGAACACCGAGAUCACCAAGGCCCCCCUGUCCGCCUCCAUGAUCAAGCGGUACGACGAGCACCACCAGGACCUGACCCU |
| | | GCUGAAGGCCCUGGUGCGGCAGCAGCUGCCCGAGAAGUACAAGGAGAUCUUCUUCGACCAGUCCAAGAACGGCUACGCCGGCUACAUCGAC |
| | | GGCGGCGCCUCCCAGGAGGAGUUCUACAAGUUCAUCAAGCCCAUCCUGGAGAAGAUGGACGGCACCGAGGAGCUGCUGGUGAAGCUGAACC |
| | | GGGAGGACCUGCUGCGGAAGCAGCGGACCUUCGACAACGGCUCCAUCCCCCACCAGAUCCACCUGGGCGAGCUGCACGCCAUCCUGCGGCG |
| | | GCAGGAGGACUUCUACCCCUUCCUGAAGGACAACCGGGAGAAGAUCGAGAAGAUCCUGACCUUCCGGAUCCCCUACUACGUGGGCCCCCUG |
| | | GCCCGGGGCAACUCCCGGUUCGCCUGGAUGACCCGGAAGUCCGAGGAGACCAUCACCCCCUGGAACUUCGAGGAGGUGGUGGACAAGGGCG |
| | | CCUCCGCCCAGUCCUUCAUCGAGCGGAUGACCAACUUCGACAAGAACCUGCCCAACGAGAAGGUGCUGCCCAAGCACUCCCUGCUGUACGA |
| | | GUACUUCACCGUGUACAACGAGCUGACCAAGGUGAAGUACGUGACCGAGGGCAUGCGGAAGCCCGCCUUCCUGUCCGGCGAGCAGAAGAAG |
| | | GCCAUCGUGGACCUGCUGUUCAAGACCAACCGGAAGGUGACCGUGAAGCAGCUGAAGGAGGACUACUUCAAGAAGAUCGAGUGCUUCGACU |
| | | CCGUGGAGAUCUCCGGCGUGGAGGACCGGUUCAACGCCUCCCUGGGCACCUACCACGACCUGCUGAAGAUCAUCAAGGACAAGGACUUCCU |
| | | GGACAACGAGGAGAACGAGGACAUCCUGGAGGACAUCGUGCUGACCCUGACCCUGUUCGAGGACCGGGAGAUGAUCGAGGAGCGGCUGAAG |
| | | ACCUACGCCCACCUGUUCGACGACAAGGUGAUGAAGCAGCUGAAGCGGCGGCGGUACACCGGCUGGGGCCGGCUGUCCCGGAAGCUGAUCA |
| | | ACGGCAUCCGGGACAAGCAGUCCGGCAAGACCAUCCUGGACUUCCUGAAGUCCGACGGCUUCGCCAACCGGAACUUCAUGCAGCUGAUCCA |
| | | CGACGACUCCCUGACCUUCAAGGAGGACAUCCAGAAGGCCCAGGUGUCCGGCCAGGGCGACUCCCUGCACGAGCACAUCGCCAACCUGGCC |
| | | GGCUCCCCCGCCAUCAAGAAGGGCAUCCUGCAGACCGUGAAGGUGGUGGACGAGCUGGUGAAGGUGAUGGGCCGGCACAAGCCCGAGAACA |
| | | UCGUGAUCGAGAUGGCCCGGGAGAACCAGACCACCCAGAAGGGCCAGAAGAACUCCCGGGAGCGGAUGAAGCGGAUCGAGGAGGGCAUCAA |
| | | GGAGCUGGGCUCCCAGAUCCUGAAGGAGCACCCCGUGGAGAACACCCAGCUGCAGAACGAGAAGCUGUACCUGUACUACCUGCAGAACGGC |
| | | CGGGACAUGUACGUGGACCAGGAGCUGGACAUCAACCGGCUGUCCGACUACGACGUGGACCACAUCGUGCCCCAGUCCUUCCUGAAGGACG |
| | | ACUCCAUCGACAACAAGGUGCUGACCCGGUCCGACAAGAACCGGGGCAAGUCCGACAACGUGCCCUCCGAGGAGGUGGUGAAGAAGAUGAA |
| | | GAACUACUGGCGGCAGCUGCUGAACGCCAAGCUGAUCACCCAGCGGAAGUUCGACAACCUGACCAAGGCCGAGCGGGGCGGCCUGUCCGAG |
| | | CUGGACAAGGCCGGCUUCAUCAAGCGGCAGCUGGUGGAGACCCGGCAGAUCACCAAGCACGUGGCCCAGAUCCUGGACUCCCGGAUGAACA |
| | | CCAAGUACGACGAGAACGACAAGCUGAUCCGGGAGGUGAAGGUGAUCACCCUGAAGUCCAAGCUGGUGUCCGACUUCCGGAAGGACUUCCA |
| | | GUUCUACAAGGUGCGGGAGAUCAACAACUACCACCACGCCCACGACGCCUACCUGAACGCCGUGGUGGGCACCGCCCUGAUCAAGAAGUAC |
| | | CCCAAGCUGGAGUCCGAGUUCGUGUACGGCGACUACAAGGUGUACGACGUGCGGAAGAUGAUCGCCAAGUCCGAGCAGGAGAUCGGCAAGG |
| | | CCACCGCCAAGUACUUCUUCUACUCCAACAUCAUGAACUUCUUCAAGACCGAGAUCACCCUGGCCAACGGCGAGAUCCGGAAGCGGCCCCU |
| | | GAUCGAGACCAACGGCGAGACCGGCGAGAUCGUGUGGGACAAGGGCCGGGACUUCGCCACCGUGCGGAAGGUGCUGUCCAUGCCCCAGGUG |
| | | AACAUCGUGAAGAAGACCGAGGUGCAGACCGGCGGCUUCUCCAAGGAGUCCAUCCUGCCCAAGCGGAACUCCGACAAGCUGAUCGCCCGGA |
| | | AGAAGGACUGGGACCCCAAGAAGUACGGCGGCUUCGACUCCCCCACCGUGGCCUACUCCGUGCUGGUGGUGGCCAAGGUGGAGAAGGGCAA |
| | | GUCCAAGAAGCUGAAGUCCGUGAAGGAGCUGCUGGGCAUCACCAUCAUGGAGCGGUCCUCCUUCGAGAAGAACCCCAUCGACUUCCUGGAG |
| | | GCCAAGGGCUACAAGGAGGUGAAGAAGGACCUGAUCAUCAAGCUGCCCAAGUACUCCCUGUUCGAGCUGGAGAACGGCCGGAAGCGGAUGC |
| | | UGGCCUCCGCCGGCGAGCUGCAGAAGGGCAACGAGCUGGCCCUGCCCUCCAAGUACGUGAACUUCCUGUACCUGGCCUCCCACUACGAGAA |
| | | GCUGAAGGGCUCCCCCGAGGACAACGAGCAGAAGCAGCUGUUCGUGGAGCAGCACAAGCACUACCUGGACGAGAUCAUCGAGCAGAUCUCC |
| | | GAGUUCUCCAAGCGGGUGAUCCUGGCCGACGCCAACCUGGACAAGGUGCUGUCCGCCUACAACAAGCACCGGGACAAGCCCAUCCGGGAGC |
| | | AGGCCGAGAACAUCAUCCACCUGUUCACCCUGACCAACCUGGGCGCCCCCGCCGCCUUCAAGUACUUCGACACCACCAUCGACAAGAAGCG |
| | | GUACACCUCCACCAAGGAGGUGCUGGACGCCACCCUGAUCCACCAGUCCAUCACCGGCCUGUACGAGACCCGGAUCGACCUGUCCCAGCUG |
| | | GGCGGCGACGGCGCCCCCGAGUCCGCCACCGAGUCCGGCGGCACCUCCACCGAGUCCGAGGGCUCCGCCGGCACCUCCACCGAGUCCGAGG |
| | | GCUCCGCCGGCUCCGCCGGCUCCACCUCCACCGAGGAGGGCACCUCCACCGAGUCCGAGGGCUCCGCCGGCACCUCCACCGAGUCCGAGGG |
| | | CUCCGCCGGCACCUCCGAGUCCGCCACCGAGUCCGGCGGCACCUCCACCGAGUCCGAGGGCUCCUCCUCCGGUGCCGCCUUCAAGCCCAAC |
| | | CCCAUCAACUACAUCCUGGGCCUGGACAUCGGCAUCGCCUCCGUGGGCUGGGCCAUGGUGGAGAUCGACGAGGAGGAGAACCCCAUCCGGC |
| | | UGAUCGACCUGGGCGUGCGGGUGUUCGAGCGGGCCGAGGUGCCCAAGACCGGCGACUCCCUGGCCAUGGCCCGGCGGCUGGCCCGGUCCGU |
| | | GCGGCGGCUGACCCGGCGGCGGGCCCACCGGCUGCUGCGGGCCCGGCGGCUGCUGAAGCGGGAGGGCGUGCUGCAGGCCGCCGACUUCGAC |
| | | GAGAACGGCCUGAUCAAGUCCCUGCCCAACACCCCCUGGCAGCUGCGGGCCGCCGCCCUGGACCGGAAGCUGACCCCCCUGGAGUGGUCCG |
| | | CCGUGCUGCUGCACCUGAUCAAGCACCGGGGCUACCUGUCCCAGCGGAAGAACGAGGGCGAGACCGCCGACAAGGAGCUGGGCGCCCUGCU |
| | | GAAGGGCGUGGCCAACAACGCCCACGCCCUGCAGACCGGCGACUUCCGGACCCCCGCCGAGCUGGCCCUGAACAAGUUCGAGAAGGAGUCC |
| | | GGCCACAUCCGGAACCAGCGGGGCGACUACUCCCACACCUUCUCCCGGAAGGACCUGCAGGCCGAGCUGAUCCUGCUGUUCGAGAAGCAGA |
| | | AGGAGUUCGGCAACCCCCACGUGUCCGGCGGCCUGAAGGAGGGCAUCGAGACCCUGCUGAUGACCCAGCGGCCCGCCCUGUCCGGCGACGC |
| | | CGUGCAGAAGAUGCUGGGCCACUGCACCUUCGAGCCCGCCGAGCCCAAGGCCGCCAAGAACACCUACACCGCCGAGCGGUUCAUCUGGCUG |
| | | ACCAAGCUGAACAACCUGCGGAUCCUGGAGCAGGGCUCCGAGCGGCCCCUGACCGACACCGAGCGGGCCACCCUGAUGGACGAGCCCUACC |
| | | GGAAGUCCAAGCUGACCUACGCCCAGGCCCGGAAGCUGCUGGGCCUGGAGGACACCGCCUUCUUCAAGGGCCUGCGGUACGGCAAGGACAA |
| | | CGCCGAGGCCUCCACCCUGAUGGAGAUGAAGGCCUACCACGCCAUCUCCCGGGCCCUGGAGAAGGAGGGCCUGAAGGACAAGAAGUCCCCC |
| | | CUGAACCUGUCCUCCGAGCUGCAGGACGAGAUCGGCACCGCCUUCUCCCUGUUCAAGACCGACGAGGACAUCACCGGCCGGCUGAAGGACC |
| | | GGGUGCAGCCCGAGAUCCUGGAGGCCCUGCUGAAGCACAUCUCCUUCGACAAGUUCGUGCAGAUCUCCCUGAAGGCCCUGCGGCGGAUCGU |
| | | GCCCCUGAUGGAGCAGGGCAAGCGGUACGACGAGGCCUGCGCCGAGAUCUACGGCGACCACUACGGCAAGAAGAACACCGAGGAGAAGAUC |
| | | UACCUGCCCCCCAUCCCCGCCGACGAGAUCCGGAACCCCGUGGUGCUGCGGGCCCUGUCCCAGGCCCGGAAGGUGAUCAACGGCGUGGUGC |
| | | GGCGGUACGGCUCCCCCGCCCGGAUCCACAUCGAGACCGCCCGGGAGGUGGGCAAGUCCUUCAAGGACCGGAAGGAGAUCGAGAAGCGGCA |
| | | GGAGGAGAACCGGAAGGACCGGGAGAAGGCCGCCGCCAAGUUCCGGGAGUACUUCCCCAACUUCGUGGGCGAGCCCAAGUCCAAGGACAUC |
| | | CUGAAGCUGCGGCUGUACGAGCAGCAGCACGGCAAGUGCCUGUACUCCGGCAAGGAGAUCAACCUGGUGCGGCUGAACGAGAAGGGCUACG |
| | | UGGAGAUCGACCACGCCCUGCCCUUCUCCCGGACCUGGGACGACUCCUUCAACAACAAGGUGCUGGUGCUGGGCUCCGAGAACCAGAACAA |
| | | GGGCAACCAGACCCCCUACGAGUACUUCAACGGCAAGGACAACUCCCGGGAGUGGCAGGAGUUCAAGGCCCGGGUGGAGACCUCCCGGUUC |
| | | CCCCGGUCCAAGAAGCAGCGGAUCCUGCUGCAGAAGUUCGACGAGGACGGCUUCAAGGAGUGCAACCUGAACGACACCCGGUACGUGAACC |
| | | GCUUCCUGUGCCAGUUCGUGGCCGACCACAUCCUGCUGACCGGCAAGGGCAAGCGGCGGGUGUUCGCCUCCAACGGCCAGAUCACCAACCU |
| | | GCUGCGGGGCUUCUGGGGCCUGCGGAAGGUGCGGGCCGAGAACGACCGGCACCACGCCCUGGACGCCGUGGUGGUGGCCUGCUCCACCGUG |
| | | GCCAUGCAGCAGAAGAUCACCCGGUUCGUGCGGUACAAGGAGAUGAACGCCUUCGACGGCAAGACCAUCGACAAGGAGACCGGCAAGGUGC |
| | | UGCACCAGAAGACCCACUUCCCCCAGCCCUGGGAGUUCUUCGCCCAGGAGGUGAUGAUCCGGGUGUUCGGCAAGCCCGACGGCAAGCCCGA |
| | | GUUCGAGGAGGCCGACACCCCCGAGAAGCUGCGGACCCUGCUGGCCGAGAAGCUGUCCUCCCGGCCCGAGGCCGUGCACGAGUACGUGACC |
| | | CCCCUGUUCGUGUCCCGGGCCCCCAACCGGAAGAUGUCCGGCGCCCACAAGGACACCCUGCGGUCCGCCAAGCGGUUCGUGAAGCACAACG |
| | | AGAAGAUCUCCGUGAAGCGGGUGUGGCUGACCGAGAUCAAGCUGGCCGACCUGGAGAACAUGGUGAACUACAAGAACGGCCGGGAGAUCGA |
| | | GCUGUACGAGGCCCUGAAGGCCCGGCUGGAGGCCUACGGCGGCAACGCCAAGCAGGCCUUCGACCCCAAGGACAACCCCUUCUACAAGAAG |
| | | GGCGGCCAGCUGGUGAAGGCCGUGCGGGUGGAGAAGACCCAGGAGUCCGGCGUGCUGCUGAACAAGAAGAACGCCUACACCAUCGCCGACA |
| | | ACGGCGACAUGGUGCGGGUGGACGUGUUCUGCAAGGUGGACAAGAAGGGCAAGAACCAGUACUUCAUCGUGCCCAUCUACGCCUGGCAGGU |
| | | GGCCGAGAACAUCCUGCCCGACAUCGACUGCAAGGGCUACCGGAUCGACGACUCCUACACCUUCUGCUUCUCCCUGCACAAGUACGACCUG |
| | | AUCGCCUUCCAGAAGGACGAGAAGUCCAAGGUGGAGUUCGCCUACUACAUCAACUGCGACUCCUCCAACGGCCGGUUCUACCUGGCCUGGC |
| | | ACGACAAGGGCUCCAAGGAGCAGCAGUUCCGGAUCUCCACCCAGAACCUGGUGCUGAUCCAGAAGUACCAGGUGAACGAGCUGGGCAAGGA |
| | | GAUCCGGCCCUGCCGGCUGAAGAAGCGGCCCCCCGUGCGGUCCGGAAAGCGGACCGCCGACGGCUCCGGAGGAGGAAGCCCGAAGAAGAAG |
| | | AGAAAGGUCAGCGAAAGCGCAACACCGGAAAGCGUCAGCGGAUGGAGACUGUUCAAGAAGAUCAGCUAG |
| 43 | Cas9- | MDKKYSIGLDIGTNSVGWAVITDEYKVPSKKFKVLGNTDRHSIKKNLIGALLFDSGETAEATRLKRTARRRYTRRKNRICYLQEIFSNEMA |
| | Cas9 | KVDDSFFHRLEESFLVEEDKKHERHPIFGNIVDEVAYHEKYPTIYHLRKKLVDSTDKADLRLIYLALAHMIKFRGHFLIEGDLNPDNSDVD |
| | fusion | KLFIQLVQTYNQLFEENPINASGVDAKAILSARLSKSRRLENLIAQLPGEKKNGLFGNLIALSLGLTPNFKSNFDLAEDAKLQLSKDTYDD |
| | with | DLDNLLAQIGDQYADLFLAAKNLSDAILLSDILRVNTEITKAPLSASMIKRYDEHHQDLTLLKALVRQQLPEKYKEIFFDQSKNGYAGYID |
| | HiBit | GGASQEEFYKFIKPILEKMDGTEELLVKLNREDLLRKQRTFDNGSIPHQIHLGELHAILRRQEDFYPFLKDNREKIEKILTFRIPYYVGPL |
| | tag | ARGNSRFAWMTRKSEETITPWNFEEVVDKGASAQSFIERMTNFDKNLPNEKVLPKHSLLYEYFTVYNELTKVKYVTEGMRKPAFLSGEQKK |
| | (mRNA | AIVDLLFKTNRKVTVKQLKEDYFKKIECFDSVEISGVEDRFNASLGTYHDLLKIIKDKDFLDNEENEDILEDIVLTLTLFEDREMIEERLK |
| | M)- | TYAHLFDDKVMKQLKRRRYTGWGRLSRKLINGIRDKQSGKTILDFLKSDGFANRNFMQLIHDDSLTFKEDIQKAQVSGQGDSLHEHIANLA |
| | amino | GSPAIKKGILQTVKVVDELVKVMGRHKPENIVIEMARENQTTQKGQKNSRERMKRIEEGIKELGSQILKEHPVENTQLQNEKLYLYYLQNG |
| | acid | RDMYVDQELDINRLSDYDVDHIVPQSFLKDDSIDNKVLTRSDKNRGKSDNVPSEEVVKKMKNYWRQLLNAKLITQRKFDNLTKAERGGLSE |
| | sequence | LDKAGFIKRQLVETRQITKHVAQILDSRMNTKYDENDKLIREVKVITLKSKLVSDFRKDFQFYKVREINNYHHAHDAYLNAVVGTALIKKY |
| | | PKLESEFVYGDYKVYDVRKMIAKSEQEIGKATAKYFFYSNIMNFFKTEITLANGEIRKRPLIETNGETGEIVWDKGRDFATVRKVLSMPQV |
| | | NIVKKTEVQTGGFSKESILPKRNSDKLIARKKDWDPKKYGGFDSPTVAYSVLVVAKVEKGKSKKLKSVKELLGITIMERSSFEKNPIDFLE |
| | | AKGYKEVKKDLIIKLPKYSLFELENGRKRMLASAGELQKGNELALPSKYVNFLYLASHYEKLKGSPEDNEQKQLFVEQHKHYLDEIIEQIS |
| | | EFSKRVILADANLDKVLSAYNKHRDKPIREQAENIIHLFTLTNLGAPAAFKYFDTTIDKKRYTSTKEVLDATLIHQSITGLYETRIDLSQL |
| | | GGDGAPESATESGGTSTESEGSAGTSTESEGSAGSAGSTSTEEGTSTESEGSAGTSTESEGSAGTSESATESGGTSTESEGSSSGAAFKPN |
| | | PINYILGLDIGIASVGWAMVEIDEEENPIRLIDLGVRVFERAEVPKTGDSLAMARRLARSVRRLTRRRAHRLLRARRLLKREGVLQAADFD |
| | | ENGLIKSLPNTPWQLRAAALDRKLTPLEWSAVLLHLIKHRGYLSQRKNEGETADKELGALLKGVANNAHALQTGDFRTPAELALNKFEKES |
| | | GHIRNQRGDYSHTFSRKDLQAELILLFEKQKEFGNPHVSGGLKEGIETLLMTQRPALSGDAVQKMLGHCTFEPAEPKAAKNTYTAERFIWL |
| | | TKLNNLRILEQGSERPLTDTERATLMDEPYRKSKLTYAQARKLLGLEDTAFFKGLRYGKDNAEASTLMEMKAYHAISRALEKEGLKDKKSP |
| | | LNLSSELQDEIGTAFSLFKTDEDITGRLKDRVQPEILEALLKHISFDKFVQISLKALRRIVPLMEQGKRYDEACAEIYGDHYGKKNTEEKI |
| | | YLPPIPADEIRNPVVLRALSQARKVINGVVRRYGSPARIHIETAREVGKSFKDRKEIEKRQEENRKDREKAAAKFREYFPNFVGEPKSKDI |
| | | LKLRLYEQQHGKCLYSGKEINLVRLNEKGYVEIDHALPFSRTWDDSFNNKVLVLGSENQNKGNQTPYEYFNGKDNSREWQEFKARVETSRF |
| | | PRSKKQRILLQKFDEDGFKECNLNDTRYVNRFLCQFVADHILLTGKGKRRVFASNGQITNLLRGFWGLRKVRAENDRHHALDAVVVACSTV |
| | | AMQQKITRFVRYKEMNAFDGKTIDKETGKVLHQKTHFPQPWEFFAQEVMIRVFGKPDGKPEFEEADTPEKLRTLLAEKLSSRPEAVHEYVT |
| | | PLFVSRAPNRKMSGAHKDTLRSAKRFVKHNEKISVKRVWLTEIKLADLENMVNYKNGREIELYEALKARLEAYGGNAKQAFDPKDNPFYKK |
| | | GGQLVKAVRVEKTQESGVLLNKKNAYTIADNGDMVRVDVFCKVDKKGKNQYFIVPIYAWQVAENILPDIDCKGYRIDDSYTFCFSLHKYDL |
| | | IAFQKDEKSKVEFAYYINCDSSNGRFYLAWHDKGSKEQQFRISTQNLVLIQKYQVNELGKEIRPCRLKKRPPVRSGKRTADGSGGGSPKKK |
| | | RKVSESATPESVSGWRLFKKIS* |
| 44 | Cas9- | AUGGACAAGAAGUACUCCAUCGGCCUGGACAUCGGCACCAACUCCGUGGGCUGGGCCGUGAUCACCGACGAGUACAAGGUGCCCUCCAAGA |
| | Cas9 | AGUUCAAGGUGCUGGGCAACACCGACCGGCACUCCAUCAAGAAGAACCUGAUCGGCGCCCUGCUGUUCGACUCCGGCGAGACCGCCGAGGC |
| | fusion | CACCCGGCUGAAGCGGACCGCCCGGCGGCGGUACACCCGGCGGAAGAACCGGAUCUGCUACCUGCAGGAGAUCUUCUCCAACGAGAUGGCC |
| | (mRNA | AAGGUGGACGACUCCUUCUUCCACCGGCUGGAGGAGUCCUUCCUGGUGGAGGAGGACAAGAAGCACGAGCGGCACCCCAUCUUCGGCAACA |
| | M)-ORF | UCGUGGACGAGGUGGCCUACCACGAGAAGUACCCCACCAUCUACCACCUGCGGAAGAAGCUGGUGGACUCCACCGACAAGGCCGACCUGCG |
| | sequence | GCUGAUCUACCUGGCCCUGGCCCACAUGAUCAAGUUCCGGGGCCACUUCCUGAUCGAGGGCGACCUGAACCCCGACAACUCCGACGUGGAC |
| | | AAGCUGUUCAUCCAGCUGGUGCAGACCUACAACCAGCUGUUCGAGGAGAACCCCAUCAACGCCUCCGGCGUGGACGCCAAGGCCAUCCUGU |
| | | CCGCCCGGCUGUCCAAGUCCCGGCGGCUGGAGAACCUGAUCGCCCAGCUGCCCGGCGAGAAGAAGAACGGCCUGUUCGGCAACCUGAUCGC |
| | | CCUGUCCCUGGGCCUGACCCCCAACUUCAAGUCCAACUUCGACCUGGCCGAGGACGCCAAGCUGCAGCUGUCCAAGGACACCUACGACGAC |
| | | GACCUGGACAACCUGCUGGCCCAGAUCGGCGACCAGUACGCCGACCUGUUCCUGGCCGCCAAGAACCUGUCCGACGCCAUCCUGCUGUCCG |
| | | ACAUCCUGCGGGUGAACACCGAGAUCACCAAGGCCCCCCUGUCCGCCUCCAUGAUCAAGCGGUACGACGAGCACCACCAGGACCUGACCCU |
| | | GCUGAAGGCCCUGGUGCGGCAGCAGCUGCCCGAGAAGUACAAGGAGAUCUUCUUCGACCAGUCCAAGAACGGCUACGCCGGCUACAUCGAC |
| | | GGCGGCGCCUCCCAGGAGGAGUUCUACAAGUUCAUCAAGCCCAUCCUGGAGAAGAUGGACGGCACCGAGGAGCUGCUGGUGAAGCUGAACC |
| | | GGGAGGACCUGCUGCGGAAGCAGCGGACCUUCGACAACGGCUCCAUCCCCCACCAGAUCCACCUGGGCGAGCUGCACGCCAUCCUGCGGCG |
| | | GCAGGAGGACUUCUACCCCUUCCUGAAGGACAACCGGGAGAAGAUCGAGAAGAUCCUGACCUUCCGGAUCCCCUACUACGUGGGCCCCCUG |
| | | GCCCGGGGCAACUCCCGGUUCGCCUGGAUGACCCGGAAGUCCGAGGAGACCAUCACCCCCUGGAACUUCGAGGAGGUGGUGGACAAGGGCG |
| | | CCUCCGCCCAGUCCUUCAUCGAGCGGAUGACCAACUUCGACAAGAACCUGCCCAACGAGAAGGUGCUGCCCAAGCACUCCCUGCUGUACGA |
| | | GUACUUCACCGUGUACAACGAGCUGACCAAGGUGAAGUACGUGACCGAGGGCAUGCGGAAGCCCGCCUUCCUGUCCGGCGAGCAGAAGAAG |
| | | GCCAUCGUGGACCUGCUGUUCAAGACCAACCGGAAGGUGACCGUGAAGCAGCUGAAGGAGGACUACUUCAAGAAGAUCGAGUGCUUCGACU |
| | | CCGUGGAGAUCUCCGGCGUGGAGGACCGGUUCAACGCCUCCCUGGGCACCUACCACGACCUGCUGAAGAUCAUCAAGGACAAGGACUUCCU |
| | | GGACAACGAGGAGAACGAGGACAUCCUGGAGGACAUCGUGCUGACCCUGACCCUGUUCGAGGACCGGGAGAUGAUCGAGGAGCGGCUGAAG |
| | | ACCUACGCCCACCUGUUCGACGACAAGGUGAUGAAGCAGCUGAAGCGGCGGCGGUACACCGGCUGGGGCCGGCUGUCCCGGAAGCUGAUCA |
| | | ACGGCAUCCGGGACAAGCAGUCCGGCAAGACCAUCCUGGACUUCCUGAAGUCCGACGGCUUCGCCAACCGGAACUUCAUGCAGCUGAUCCA |
| | | CGACGACUCCCUGACCUUCAAGGAGGACAUCCAGAAGGCCCAGGUGUCCGGCCAGGGCGACUCCCUGCACGAGCACAUCGCCAACCUGGCC |
| | | GGCUCCCCCGCCAUCAAGAAGGGCAUCCUGCAGACCGUGAAGGUGGUGGACGAGCUGGUGAAGGUGAUGGGCCGGCACAAGCCCGAGAACA |
| | | UCGUGAUCGAGAUGGCCCGGGAGAACCAGACCACCCAGAAGGGCCAGAAGAACUCCCGGGAGCGGAUGAAGCGGAUCGAGGAGGGCAUCAA |
| | | GGAGCUGGGCUCCCAGAUCCUGAAGGAGCACCCCGUGGAGAACACCCAGCUGCAGAACGAGAAGCUGUACCUGUACUACCUGCAGAACGGC |
| | | CGGGACAUGUACGUGGACCAGGAGCUGGACAUCAACCGGCUGUCCGACUACGACGUGGACCACAUCGUGCCCCAGUCCUUCCUGAAGGACG |
| | | ACUCCAUCGACAACAAGGUGCUGACCCGGUCCGACAAGAACCGGGGCAAGUCCGACAACGUGCCCUCCGAGGAGGUGGUGAAGAAGAUGAA |
| | | GAACUACUGGCGGCAGCUGCUGAACGCCAAGCUGAUCACCCAGCGGAAGUUCGACAACCUGACCAAGGCCGAGCGGGGGGCCUGUCCGAG |
| | | CUGGACAAGGCCGGCUUCAUCAAGCGGCAGCUGGUGGAGACCCGGCAGAUCACCAAGCACGUGGCCCAGAUCCUGGACUCCCGGAUGAACA |
| | | CCAAGUACGACGAGAACGACAAGCUGAUCCGGGAGGUGAAGGUGAUCACCCUGAAGUCCAAGCUGGUGUCCGACUUCCGGAAGGACUUCCA |
| | | GUUCUACAAGGUGCGGGAGAUCAACAACUACCACCACGCCCACGACGCCUACCUGAACGCCGUGGUGGGCACCGCCCUGAUCAAGAAGUAC |
| | | CCCAAGCUGGAGUCCGAGUUCGUGUACGGCGACUACAAGGUGUACGACGUGCGGAAGAUGAUCGCCAAGUCCGAGCAGGAGAUCGGCAAGG |
| | | CCACCGCCAAGUACUUCUUCUACUCCAACAUCAUGAACUUCUUCAAGACCGAGAUCACCCUGGCCAACGGCGAGAUCCGGAAGCGGCCCCU |
| | | GAUCGAGACCAACGGCGAGACCGGCGAGAUCGUGUGGGACAAGGGCCGGGACUUCGCCACCGUGCGGAAGGUGCUGUCCAUGCCCCAGGUG |
| | | AACAUCGUGAAGAAGACCGAGGUGCAGACCGGCGGCUUCUCCAAGGAGUCCAUCCUGCCCAAGCGGAACUCCGACAAGCUGAUCGCCCGGA |
| | | AGAAGGACUGGGACCCCAAGAAGUACGGCGGCUUCGACUCCCCCACCGUGGCCUACUCCGUGCUGGUGGUGGCCAAGGUGGAGAAGGGCAA |
| | | GUCCAAGAAGCUGAAGUCCGUGAAGGAGCUGCUGGGCAUCACCAUCAUGGAGCGGUCCUCCUUCGAGAAGAACCCCAUCGACUUCCUGGAG |
| | | GCCAAGGGCUACAAGGAGGUGAAGAAGGACCUGAUCAUCAAGCUGCCCAAGUACUCCCUGUUCGAGCUGGAGAACGGCCGGAAGCGGAUGC |
| | | UGGCCUCCGCCGGCGAGCUGCAGAAGGGCAACGAGCUGGCCCUGCCCUCCAAGUACGUGAACUUCCUGUACCUGGCCUCCCACUACGAGAA |
| | | GCUGAAGGGCUCCCCCGAGGACAACGAGCAGAAGCAGCUGUUCGUGGAGCAGCACAAGCACUACCUGGACGAGAUCAUCGAGCAGAUCUCC |
| | | GAGUUCUCCAAGCGGGUGAUCCUGGCCGACGCCAACCUGGACAAGGUGCUGUCCGCCUACAACAAGCACCGGGACAAGCCCAUCCGGGAGC |
| | | AGGCCGAGAACAUCAUCCACCUGUUCACCCUGACCAACCUGGGCGCCCCCGCCGCCUUCAAGUACUUCGACACCACCAUCGACAAGAAGCG |
| | | GUACACCUCCACCAAGGAGGUGCUGGACGCCACCCUGAUCCACCAGUCCAUCACCGGCCUGUACGAGACCCGGAUCGACCUGUCCCAGCUG |
| | | GGCGGCGACGGCGCCCCCGAGUCCGCCACCGAGUCCGGCGGCACCUCCACCGAGUCCGAGGGCUCCGCCGGCACCUCCACCGAGUCCGAGG |
| | | GCUCCGCCGGCUCCGCCGGCUCCACCUCCACCGAGGAGGGCACCUCCACCGAGUCCGAGGGCUCCGCCGGCACCUCCACCGAGUCCGAGGG |
| | | CUCCGCCGGCACCUCCGAGUCCGCCACCGAGUCCGGCGGCACCUCCACCGAGUCCGAGGGCUCCUCCUCCGGUGCCGCCUUCAAGCCCAAC |
| | | CCCAUCAACUACAUCCUGGGCCUGGACAUCGGCAUCGCCUCCGUGGGCUGGGCCAUGGUGGAGAUCGACGAGGAGGAGAACCCCAUCCGGC |
| | | UGAUCGACCUGGGCGUGCGGGUGUUCGAGCGGGCCGAGGUGCCCAAGACCGGCGACUCCCUGGCCAUGGCCCGGCGGCUGGCCCGGUCCGU |
| | | GCGGCGGCUGACCCGGCGGCGGGCCCACCGGCUGCUGCGGGCCCGGCGGCUGCUGAAGCGGGAGGGCGUGCUGCAGGCCGCCGACUUCGAC |
| | | GAGAACGGCCUGAUCAAGUCCCUGCCCAACACCCCCUGGCAGCUGCGGGCCGCCGCCCUGGACCGGAAGCUGACCCCCCUGGAGUGGUCCG |
| | | CCGUGCUGCUGCACCUGAUCAAGCACCGGGGCUACCUGUCCCAGCGGAAGAACGAGGGCGAGACCGCCGACAAGGAGCUGGGCGCCCUGCU |
| | | GAAGGGCGUGGCCAACAACGCCCACGCCCUGCAGACCGGCGACUUCCGGACCCCCGCCGAGCUGGCCCUGAACAAGUUCGAGAAGGAGUCC |
| | | GGCCACAUCCGGAACCAGCGGGGCGACUACUCCCACACCUUCUCCCGGAAGGACCUGCAGGCCGAGCUGAUCCUGCUGUUCGAGAAGCAGA |
| | | AGGAGUUCGGCAACCCCCACGUGUCCGGCGGCCUGAAGGAGGGCAUCGAGACCCUGCUGAUGACCCAGCGGCCCGCCCUGUCCGGCGACGC |
| | | CGUGCAGAAGAUGCUGGGCCACUGCACCUUCGAGCCCGCCGAGCCCAAGGCCGCCAAGAACACCUACACCGCCGAGCGGUUCAUCUGGCUG |
| | | ACCAAGCUGAACAACCUGCGGAUCCUGGAGCAGGGCUCCGAGCGGCCCCUGACCGACACCGAGCGGGCCACCCUGAUGGACGAGCCCUACC |
| | | GGAAGUCCAAGCUGACCUACGCCCAGGCCCGGAAGCUGCUGGGCCUGGAGGACACCGCCUUCUUCAAGGGCCUGCGGUACGGCAAGGACAA |
| | | CGCCGAGGCCUCCACCCUGAUGGAGAUGAAGGCCUACCACGCCAUCUCCCGGGCCCUGGAGAAGGAGGGCCUGAAGGACAAGAAGUCCCCC |
| | | CUGAACCUGUCCUCCGAGCUGCAGGACGAGAUCGGCACCGCCUUCUCCCUGUUCAAGACCGACGAGGACAUCACCGGCCGGCUGAAGGACC |
| | | GGGUGCAGCCCGAGAUCCUGGAGGCCCUGCUGAAGCACAUCUCCUUCGACAAGUUCGUGCAGAUCUCCCUGAAGGCCCUGCGGCGGAUCGU |
| | | GCCCCUGAUGGAGCAGGGCAAGCGGUACGACGAGGCCUGCGCCGAGAUCUACGGCGACCACUACGGCAAGAAGAACACCGAGGAGAAGAUC |
| | | UACCUGCCCCCCAUCCCCGCCGACGAGAUCCGGAACCCCGUGGUGCUGCGGGCCCUGUCCCAGGCCCGGAAGGUGAUCAACGGCGUGGUGC |
| | | GGCGGUACGGCUCCCCCGCCCGGAUCCACAUCGAGACCGCCCGGGAGGUGGGCAAGUCCUUCAAGGACCGGAAGGAGAUCGAGAAGCGGCA |
| | | GGAGGAGAACCGGAAGGACCGGGAGAAGGCCGCCGCCAAGUUCCGGGAGUACUUCCCCAACUUCGUGGGCGAGCCCAAGUCCAAGGACAUC |
| | | CUGAAGCUGCGGCUGUACGAGCAGCAGCACGGCAAGUGCCUGUACUCCGGCAAGGAGAUCAACCUGGUGCGGCUGAACGAGAAGGGCUACG |
| | | UGGAGAUCGACCACGCCCUGCCCUUCUCCCGGACCUGGGACGACUCCUUCAACAACAAGGUGCUGGUGCUGGGCUCCGAGAACCAGAACAA |
| | | GGGCAACCAGACCCCCUACGAGUACUUCAACGGCAAGGACAACUCCCGGGAGUGGCAGGAGUUCAAGGCCCGGGUGGAGACCUCCCGGUUC |
| | | CCCCGGUCCAAGAAGCAGCGGAUCCUGCUGCAGAAGUUCGACGAGGACGGCUUCAAGGAGUGCAACCUGAACGACACCCGGUACGUGAACC |
| | | GCUUCCUGUGCCAGUUCGUGGCCGACCACAUCCUGCUGACCGGCAAGGGCAAGCGGCGGGUGUUCGCCUCCAACGGCCAGAUCACCAACCU |
| | | GCUGCGGGGCUUCUGGGGCCUGCGGAAGGUGCGGGCCGAGAACGACCGGCACCACGCCCUGGACGCCGUGGUGGUGGCCUGCUCCACCGUG |
| | | GCCAUGCAGCAGAAGAUCACCCGGUUCGUGCGGUACAAGGAGAUGAACGCCUUCGACGGCAAGACCAUCGACAAGGAGACCGGCAAGGUGC |
| | | UGCACCAGAAGACCCACUUCCCCCAGCCCUGGGAGUUCUUCGCCCAGGAGGUGAUGAUCCGGGUGUUCGGCAAGCCCGACGGCAAGCCCGA |
| | | GUUCGAGGAGGCCGACACCCCCGAGAAGCUGCGGACCCUGCUGGCCGAGAAGCUGUCCUCCCGGCCCGAGGCCGUGCACGAGUACGUGACC |
| | | CCCCUGUUCGUGUCCCGGGCCCCCAACCGGAAGAUGUCCGGCGCCCACAAGGACACCCUGCGGUCCGCCAAGCGGUUCGUGAAGCACAACG |
| | | AGAAGAUCUCCGUGAAGCGGGUGUGGCUGACCGAGAUCAAGCUGGCCGACCUGGAGAACAUGGUGAACUACAAGAACGGCCGGGAGAUCGA |
| | | GCUGUACGAGGCCCUGAAGGCCCGGCUGGAGGCCUACGGCGGCAACGCCAAGCAGGCCUUCGACCCCAAGGACAACCCCUUCUACAAGAAG |
| | | GGCGGCCAGCUGGUGAAGGCCGUGCGGGUGGAGAAGACCCAGGAGUCCGGCGUGCUGCUGAACAAGAAGAACGCCUACACCAUCGCCGACA |
| | | ACGGCGACAUGGUGCGGGUGGACGUGUUCUGCAAGGUGGACAAGAAGGGCAAGAACCAGUACUUCAUCGUGCCCAUCUACGCCUGGCAGGU |
| | | GGCCGAGAACAUCCUGCCCGACAUCGACUGCAAGGGCUACCGGAUCGACGACUCCUACACCUUCUGCUUCUCCCUGCACAAGUACGACCUG |
| | | AUCGCCUUCCAGAAGGACGAGAAGUCCAAGGUGGAGUUCGCCUACUACAUCAACUGCGACUCCUCCAACGGCCGGUUCUACCUGGCCUGGC |
| | | ACGACAAGGGCUCCAAGGAGCAGCAGUUCCGGAUCUCCACCCAGAACCUGGUGCUGAUCCAGAAGUACCAGGUGAACGAGCUGGGCAAGGA |
| | | GAUCCGGCCCUGCCGGCUGAAGAAGCGGCCCCCCGUGCGGUCCGGAAAGCGGACCGCCGACGGCUCCGGAGGAGGAAGCCCGAAGAAGAAG |
| | | AGAAAGGUCUAG |
| 45 | Cas9- | MDKKYSIGLDIGTNSVGWAVITDEYKVPSKKFKVLGNTDRHSIKKNLIGALLFDSGETAEATRLKRTARRRYTRRKNRICYLQEIFSNEMA |
| | Cas9 | KVDDSFFHRLEESFLVEEDKKHERHPIFGNIVDEVAYHEKYPTIYHLRKKLVDSTDKADLRLIYLALAHMIKFRGHFLIEGDLNPDNSDVD |
| | fusion | KLFIQLVQTYNQLFEENPINASGVDAKAILSARLSKSRRLENLIAQLPGEKKNGLFGNLIALSLGLTPNFKSNFDLAEDAKLQLSKDTYDD |
| | (mRNA | DLDNLLAQIGDQYADLFLAAKNLSDAILLSDILRVNTEITKAPLSASMIKRYDEHHQDLTLLKALVRQQLPEKYKEIFFDQSKNGYAGYID |
| | M)- | GGASQEEFYKFIKPILEKMDGTEELLVKLNREDLLRKQRTFDNGSIPHQIHLGELHAILRRQEDFYPFLKDNREKIEKILTFRIPYYVGPL |
| | amino | ARGNSRFAWMTRKSEETITPWNFEEVVDKGASAQSFIERMTNFDKNLPNEKVLPKHSLLYEYFTVYNELTKVKYVTEGMRKPAFLSGEQKK |
| | acid | AIVDLLFKTNRKVTVKQLKEDYFKKIECFDSVEISGVEDRFNASLGTYHDLLKIIKDKDFLDNEENEDILEDIVLTLTLFEDREMIEERLK |
| | sequence | TYAHLFDDKVMKQLKRRRYTGWGRLSRKLINGIRDKQSGKTILDFLKSDGFANRNFMQLIHDDSLTFKEDIQKAQVSGQGDSLHEHIANLA |
| | | GSPAIKKGILQTVKVVDELVKVMGRHKPENIVIEMARENQTTQKGQKNSRERMKRIEEGIKELGSQILKEHPVENTQLQNEKLYLYYLQNG |
| | | RDMYVDQELDINRLSDYDVDHIVPQSFLKDDSIDNKVLTRSDKNRGKSDNVPSEEVVKKMKNYWRQLLNAKLITQRKFDNLTKAERGGLSE |
| | | LDKAGFIKRQLVETRQITKHVAQILDSRMNTKYDENDKLIREVKVITLKSKLVSDFRKDFQFYKVREINNYHHAHDAYLNAVVGTALIKKY |
| | | PKLESEFVYGDYKVYDVRKMIAKSEQEIGKATAKYFFYSNIMNFFKTEITLANGEIRKRPLIETNGETGEIVWDKGRDFATVRKVLSMPQV |
| | | NIVKKTEVQTGGFSKESILPKRNSDKLIARKKDWDPKKYGGFDSPTVAYSVLVVAKVEKGKSKKLKSVKELLGITIMERSSFEKNPIDFLE |
| | | AKGYKEVKKDLIIKLPKYSLFELENGRKRMLASAGELQKGNELALPSKYVNFLYLASHYEKLKGSPEDNEQKQLFVEQHKHYLDEIIEQIS |
| | | EFSKRVILADANLDKVLSAYNKHRDKPIREQAENIIHLFTLTNLGAPAAFKYFDTTIDKKRYTSTKEVLDATLIHQSITGLYETRIDLSQL |
| | | GGDGAPESATESGGTSTESEGSAGTSTESEGSAGSAGSTSTEEGTSTESEGSAGTSTESEGSAGTSESATESGGTSTESEGSSSGAAFKPN |
| | | PINYILGLDIGIASVGWAMVEIDEEENPIRLIDLGVRVFERAEVPKTGDSLAMARRLARSVRRLTRRRAHRLLRARRLLKREGVLQAADFD |
| | | ENGLIKSLPNTPWQLRAAALDRKLTPLEWSAVLLHLIKHRGYLSQRKNEGETADKELGALLKGVANNAHALQTGDFRTPAELALNKFEKES |
| | | GHIRNQRGDYSHTFSRKDLQAELILLFEKQKEFGNPHVSGGLKEGIETLLMTQRPALSGDAVQKMLGHCTFEPAEPKAAKNTYTAERFIWL |
| | | TKLNNLRILEQGSERPLTDTERATLMDEPYRKSKLTYAQARKLLGLEDTAFFKGLRYGKDNAEASTLMEMKAYHAISRALEKEGLKDKKSP |
| | | LNLSSELQDEIGTAFSLFKTDEDITGRLKDRVQPEILEALLKHISFDKFVQISLKALRRIVPLMEQGKRYDEACAEIYGDHYGKKNTEEKI |
| | | YLPPIPADEIRNPVVLRALSQARKVINGVVRRYGSPARIHIETAREVGKSFKDRKEIEKRQEENRKDREKAAAKFREYFPNFVGEPKSKDI |
| | | LKLRLYEQQHGKCLYSGKEINLVRLNEKGYVEIDHALPFSRTWDDSFNNKVLVLGSENQNKGNQTPYEYFNGKDNSREWQEFKARVETSRF |
| | | PRSKKQRILLQKFDEDGFKECNLNDTRYVNRFLCQFVADHILLTGKGKRRVFASNGQITNLLRGFWGLRKVRAENDRHHALDAVVVACSTV |
| | | AMQQKITRFVRYKEMNAFDGKTIDKETGKVLHQKTHFPQPWEFFAQEVMIRVFGKPDGKPEFEEADTPEKLRTLLAEKLSSRPEAVHEYVT |
| | | PLFVSRAPNRKMSGAHKDTLRSAKRFVKHNEKISVKRVWLTEIKLADLENMVNYKNGREIELYEALKARLEAYGGNAKQAFDPKDNPFYKK |
| | | GGQLVKAVRVEKTQESGVLLNKKNAYTIADNGDMVRVDVFCKVDKKGKNQYFIVPIYAWQVAENILPDIDCKGYRIDDSYTFCFSLHKYDL |
| | | IAFQKDEKSKVEFAYYINCDSSNGRFYLAWHDKGSKEQQFRISTQNLVLIQKYQVNELGKEIRPCRLKKRPPVRSGKRTADGSGGGSPKKK |
| | | RKV* |
| 46 | R1333 | auggacaagaaguacuccaucggccuggacaucggcaccaacuccgugggcugggccgugaucaccgacgaguacaaggugcccuccaaga |
| | WT | aguucaaggugcugggcaacaccgaccggcacuccaucaagaagaaccugaucggcgcccugcuguucgacuccggcgagaccgccgaggc |
| | Cas9- | cacccggcugaagcggaccgcccggcggcgguacacccggcggaagaaccggaucugcuaccugcaggagaucuucuccaacgagauggcc |
| | Cas9 | aagguggacgacuccuucuuccaccggcuggaggaguccuuccugguggaggaggacaagaagcacgagcggcaccccaucuucggcaaca |
| | fusion | ucguggacgagguggccuaccacgagaaguaccccaccaucuaccaccugcggaagaagcugguggacuccaccgacaaggccgaccugcg |
| | PA1-4 | gcugaucuaccuggcccuggcccacaugaucaaguuccgggcgccacuuccugaucgaggggaccugaaccccgacaacuccgacguggac |
| | (mRNA | aagcuguucauccagcuggugcagaccuacaaccagcuguucgaggagaaccccaucaacgccuccggcguggacgccaaggccauccugu |
| | N)- | ccgcccggcuguccaagucccggcggcuggagaaccugaucgcccagcugcccggcgagaagaagaacggccuguucggcaaccugaucgc |
| | ORF | ccugucccugggccugacccccaacuucaaguccaacuucgaccuggccgaggacgccaagcugcagcuguccaaggacaccuacgacgac |
| | sequence | gaccuggacaaccugcuggcccagaucggcgaccaguacgccgaccuguuccuggccgccaagaaccuguccgacgccauccugcuguccg |
| | (Example | acauccugcgggugaacaccgagaucaccaaggccccccuguccgccuccaugaucaagcgguacgacgagcaccaccaggaccugacccu |
| | 4) | gcugaaggcccuggugcggcagcagcugcccgagaaguacaaggagaucuucuucgaccaguccaagaacggcuacgccggcuacaucgac |
| | | ggcggcgccucccaggaggaguucuacaaguucaucaagcccauccuggagaagauggacggcaccgaggagcugcuggugaagcugaacc |
| | | gggaggaccugcugcggaagcagcggaccuucgacaacggcuccaucccccaccagauccaccugggcgagcugcacgccauccugcggcg |
| | | gcaggaggacuucuaccccuuccugaaggacaaccgggagaagaucgagaagauccugaccuuccggauccccuacuacgugggcccccug |
| | | gcccggggcaacucccgguucgccuggaugacccggaaguccgaggagaccaucacccccuggaacuucgaggaggugguggacaagggcg |
| | | ccuccgcccaguccuucaucgagcggaugaccaacuucgacaagaaccugcccaacgagaaggugcugcccaagcacucccugcuguacga |
| | | guacuucaccguguacaacgagcugaccaaggugaaguacgugaccgagggcaugcggaagcccgccuuccuguccggcgagcagaagaag |
| | | gccaucguggaccugcuguucaagaccaaccggaaggugaccgugaagcagcugaaggaggacuacuucaagaagaucgagugcuucgacu |
| | | ccguggagaucuccggcguggaggaccgguucaacgccucccugggcaccuaccacgaccugcugaagaucaucaaggacaaggacuuccu |
| | | ggacaacgaggagaacgaggacauccuggaggacaucgugcugacccugacccuguucgaggaccgggagaugaucgaggagcggcugaag |
| | | accuacgcccaccuguucgacgacaaggugaugaagcagcugaagcggcggcgguacaccggcuggggccggcugucccggaagcugauca |
| | | acggcauccgggacaagcaguccggcaagaccauccuggacuuccugaaguccgacggcuucgccaaccggaacuucaugcagcugaucca |
| | | cgacgacucccugaccuucaaggaggacauccagaaggcccagguguccggccagggcgacucccugcacgagcacaucgccaaccuggcc |
| | | ggcucccccgccaucaagaagggcauccugcagaccgugaaggugguggacgagcuggugaaggugaugggccggcacaagcccgagaaca |
| | | ucgugaucgagauggcccgggagaaccagaccacccagaagggccagaagaacucccgggagcggaugaagcggaucgaggagggcaucaa |
| | | ggagcugggcucccagauccugaaggagcaccccguggagaacacccagcugcagaacgagaagcuguaccuguacuaccugcagaacggc |
| | | cgggacauguacguggaccaggagcuggacaucaaccggcuguccgacuacgacguggaccacaucgugccccaguccuuccugaaggacg |
| | | acuccaucgacaacaaggugcugacccgguccgacaagaaccggggcaaguccgacaacgugcccuccgaggagguggugaagaagaugaa |
| | | gaacuacuggcggcagcugcugaacgccaagcugaucacccagcggaaguucgacaaccugaccaaggccgagcggcggggccuguccgag |
| | | cuggacaaggccggcuucaucaagcggcagcugguggagacccggcagaucaccaagcacguggcccagauccuggacucccggaugaaca |
| | | ccaaguacgacgagaacgacaagcugauccgggaggugaaggugaucacccugaaguccaagcugguguccgacuuccggaaggacuucca |
| | | guucuacaaggugcgggagaucaacaacuaccaccacgcccacgacgccuaccugaacgccguggugggcaccgcccugaucaagaaguac |
| | | cccaagcuggaguccgaguucguguacggcgacuacaagguguacgacgugcggaagaugaucgccaaguccgagcaggagaucggcaagg |
| | | ccaccgccaaguacuucuucuacuccaacaucaugaacuucuucaagaccgagaucacccuggccaacggcgagauccggaagcggccccu |
| | | gaucgagaccaacggcgagaccggcgagaucgugugggacaagggccgggacuucgccaccgugcggaaggugcuguccaugccccaggug |
| | | aacaucgugaagaagaccgaggugcagaccggcggcuucuccaaggaguccauccugcccaagcggaacuccgacaagcugaucgcccgga |
| | | agaaggacugggaccccaagaaguacggcggcuucgacucccccaccguggccuacuccgugcuggugguggccaagguggagaagggcaa |
| | | guccaagaagcugaaguccgugaaggagcugcugggcaucaccaucauggagcgguccuccuucgagaagaaccccaucgacuuccuggag |
| | | gccaagggcuacaaggaggugaagaaggaccugaucaucaagcugcccaaguacucccuguucgagcuggagaacggccggaagcggaugc |
| | | uggccuccgccggcgagcugcagaagggcaacgagcuggcccugcccuccaaguacgugaacuuccuguaccuggccucccacuacgagaa |
| | | gcugaagggcucccccgaggacaacgagcagaagcagcuguucguggagcagcacaagcacuaccuggacgagaucaucgagcagaucucc |
| | | gaguucuccaagcgggugauccuggccgacgccaaccuggacaaggugcuguccgccuacaacaagcaccgggacaagcccauccgggagc |
| | | aggccgagaacaucauccaccuguucacccugaccaaccugggcgcccccgccgccuucaaguacuucgacaccaccaucgacCGGaagcg |
| | | guacaccuccaccaaggaggugcuggacgccacccugauccaccaguccaucaccggccuguacgagacccggaucgaccugucccagcug |
| | | ggcggcgacGGCgccCCCgagUCCgccACCgagUCCggcGGCaccUCCaccGAGuccGAGggcUCCgccGGCaccUCCaccGAGuccGAGg |
| | | gcuccGCCggcUCCgccGGCuccaccUCCaccGAGgagGGCaccUCCaccGAGuccGAGggcuccGCCggcACCuccACCgaguccgagGG |
| | | CuccGCCggcACCuccGAGuccgccACCgagUCCggcGGCaccUCCaccGAGuccGAGggCUCCuccUCCggugccgccuucaagcccaac |
| | | cccaucaacuacauccugggccuggacaucggcaucgccuccguggguggcgccaugguggagaucgacgaggaggagaaccccauccggc |
| | | ugaucgaccugggcgugcggguguucgagcgggccgaggugcccaagaccggcgacucccuggccauggcccgggcgcuggcccgguccgu |
| | | gcggcggcugacccggcggcgggcccaccggcugcugcgggcccggcggcugcugaagcgggagggcgugcugcaggccgccgacuucgac |
| | | gagaacggccugaucaagucccugcccaacacccccuggcagcugcgggccgccgcccuggaccggaagcugaccccccuggagugguccg |
| | | ccgugcugcugcaccugaucaagcaccggggcuaccugucccagcggaagaacgagggcgagaccgccgacaaggagcugggcgcccugcu |
| | | gaagggcguggccaacaacgcccacgcccugcagaccggcgacuuccggacccccgccgagcuggcccugaacaaguucgagaaggagucc |
| | | ggccacauccggaaccagcggggcgacuacucccacaccuucucccggaaggaccugcaggccgagcugauccugcuguucgagaagcaga |
| | | aggaguucggcaacccccacguguccggcggccugaaggagggcaucgagacccugcugaugacccagcggcccgcccuguccggcgacgc |
| | | cgugcagaagaugcugggccacugcaccuucgagcccgccgagcccaaggccgccaagaacaccuacaccgccgagcgguucaucuggcug |
| | | accaagcugaacaaccugcggauccuggagcagggcuccgagcggccccugaccgacaccgagcgggccacccugauggacgagcccuacc |
| | | ggaaguccaagcugaccuacgcccaggcccggaagcugcugggccuggaggacaccgccuucuucaagggccugcgguacggcaaggacaa |
| | | cgccgaggccuccacccugauggagaugaaggccuaccacgccaucucccgggcccuggagaaggagggccugaaggacaagaaguccccc |
| | | cugaaccuguccuccgagcugcaggacgagaucggcaccgccuucucccuguucaagaccgacgaggacaucaccggccggcugaaggacc |
| | | gggugcagcccgagauccuggaggcccugcugaagcacaucuccuucgacaaguucgugcagaucucccugaaggcccugcggcggaucgu |
| | | gccccugauggagcagggcaagcgguacgacgaggccugcgccgagaucuacggcgaccacuacggcaagaagaacaccgaggagaagauc |
| | | uaccugccccccauccccgccgacgagauccggaaccccguggugcugcgggcccugucccaggcccggaaggugaucaacggcguggugc |
| | | ggcgguacggcucccccgcccggauccacaucgagaccgcccgggaggugggcaaguccuucaaggaccggaaggagaucgagaagcggca |
| | | ggaggagaaccggaaggaccgggagaaggccgccgccaaguuccgggaguacuuccccaacuucgugggcgagcccaaguccaaggacauc |
| | | cugaagcugcggcuguacgagcagcagcacggcaagugccuguacuccggcaaggagaucaaccuggugcggcugaacgagaagggcuacg |
| | | uggagaucgaccacgcccugcccuucucccggaccugggacgacuccuucaacaacaaggugcuggugcugggcuccgagaaccagaacaa |
| | | gggcaaccagacccccuacgaguacuucaacggcaaggacaacucccgggaguggcaggaguucaaggcccggguggagaccucccgguuc |
| | | ccccgguccaagaagcagcggauccugcugcagaaguucgacgaggacggcuucaaggagugcaaccugaacgacacccgguacgugaacc |
| | | gcuuccugugccaguucguggccgaccacauccugcugaccggcaagggcaagcggggcguguucgccuccaacggccagaucaccaaccu |
| | | gcugcggggcuucuggggccugcggaaggugcgggccgagaacgaccggcaccacgcccuggacgccguggugguggccugcuccaccgug |
| | | gccaugcagcagaagaucacccgguucgugcgguacaaggagaugaacgccuucgacggcaagaccaucgacaaggagaccggcaaggugc |
| | | ugcaccagaagacccacuucccccagcccugggaguucuucgcccaggaggugaugauccggguguucggcaagcccgacggcaagcccga |
| | | guucgaggaggccgacacccccgagaagcugcggacccugcuggccgagaagcuguccucccggcccgaggccgugcacgaguacgugacc |
| | | ccccuguucgugucccgggcccccaaccggaagauguccggcgcccacaaggacacccugcgguccgccaagcgguucgugaagcacaacg |
| | | agaagaucuccgugaagcggguguggcugaccgagaucaagcuggccgaccuggagaacauggugaacuacaagaacggccgggagaucga |
| | | gcuguacgaggcccugaaggcccggcuggaggccuacggcggcaacgccaagcaggccuucgaccccaaggacaaccccuucuacaagaag |
| | | ggcggccagcuggugaaggccgugcggguggagaagacccaggaguccggcgugcugcugaacaagaagaacgccuacaccaucgccgaca |
| | | acggcgacauggugcggguggacguguucugcaagguggacaagaagggcaagaaccaguacuucaucgugcccaucuacgccuggcaggu |
| | | ggccgagaacauccugcccgacaucgacugcaagggcuaccggaucgacgacuccuacaccuucugcuucucccugcacaaguacgaccug |
| | | aucgccuuccagaaggacgagaaguccaagguggaguucgccuacuacaucaacugcgacuccuccaacggccgcguucuaccuggccugg |
| | | acgacaagggcuccaaggagcagcaguuccggaucuccacccagaaccuggugcugauccagaaguaccaggugaacgagcugggcaagga |
| | | gauccggcccugccggcugaagaagcggccccccgugcgguccggaaagcggaccgccgacggcuccgaguucgagucccccaagaagaag |
| | | cggaagguggaguag |
| 47 | R1333 | MDKKYSIGLDIGTNSVGWAVITDEYKVPSKKFKVLGNTDRHSIKKNLIGALLFDSGETAEATRLKRTARRRYTRRKNRICYLQEIFSNEMA |
| | WT | KVDDSFFHRLEESFLVEEDKKHERHPIFGNIVDEVAYHEKYPTIYHLRKKLVDSTDKADLRLIYLALAHMIKFRGHFLIEGDLNPDNSDVD |
| | Cas9- | KLFIQLVQTYNQLFEENPINASGVDAKAILSARLSKSRRLENLIAQLPGEKKNGLFGNLIALSLGLTPNFKSNFDLAEDAKLQLSKDTYDD |
| | Cas9 | DLDNLLAQIGDQYADLFLAAKNLSDAILLSDILRVNTEITKAPLSASMIKRYDEHHQDLTLLKALVRQQLPEKYKEIFFDQSKNGYAGYID |
| | fusion | GGASQEEFYKFIKPILEKMDGTEELLVKLNREDLLRKQRTFDNGSIPHQIHLGELHAILRRQEDFYPFLKDNREKIEKILTFRIPYYVGPL |
| | PA1-4 | ARGNSRFAWMTRKSEETITPWNFEEVVDKGASAQSFIERMTNFDKNLPNEKVLPKHSLLYEYFTVYNELTKVKYVTEGMRKPAFLSGEQKK |
| | (mRNA | AIVDLLFKTNRKVTVKQLKEDYFKKIECFDSVEISGVEDRFNASLGTYHDLLKIIKDKDFLDNEENEDILEDIVLTLTLFEDREMIEERLK |
| | N)- | TYAHLFDDKVMKQLKRRRYTGWGRLSRKLINGIRDKQSGKTILDFLKSDGFANRNFMQLIHDDSLTFKEDIQKAQVSGQGDSLHEHIANLA |
| | amino | GSPAIKKGILQTVKVVDELVKVMGRHKPENIVIEMARENQTTQKGQKNSRERMKRIEEGIKELGSQILKEHPVENTQLQNEKLYLYYLQNG |
| | acid | RDMYVDQELDINRLSDYDVDHIVPQSFLKDDSIDNKVLTRSDKNRGKSDNVPSEEVVKKMKNYWRQLLNAKLITQRKFDNLTKAERGGLSE |
| | sequence | LDKAGFIKRQLVETRQITKHVAQILDSRMNTKYDENDKLIREVKVITLKSKLVSDFRKDFQFYKVREINNYHHAHDAYLNAVVGTALIKKY |
| | (Example | PKLESEFVYGDYKVYDVRKMIAKSEQEIGKATAKYFFYSNIMNFFKTEITLANGEIRKRPLIETNGETGEIVWDKGRDFATVRKVLSMPQV |
| | 4) | NIVKKTEVQTGGFSKESILPKRNSDKLIARKKDWDPKKYGGFDSPTVAYSVLVVAKVEKGKSKKLKSVKELLGITIMERSSFEKNPIDFLE |
| | | AKGYKEVKKDLIIKLPKYSLFELENGRKRMLASAGELQKGNELALPSKYVNFLYLASHYEKLKGSPEDNEQKQLFVEQHKHYLDEIIEQIS |
| | | EFSKRVILADANLDKVLSAYNKHRDKPIREQAENIIHLFTLTNLGAPAAFKYFDTTIDRKRYTSTKEVLDATLIHQSITGLYETRIDLSQL |
| | | GGDGAPESATESGGTSTESEGSAGTSTESEGSAGSAGSTSTEEGTSTESEGSAGTSTESEGSAGTSESATESGGTSTESEGSSSGAAFKPN |
| | | PINYILGLDIGIASVGWAMVEIDEEENPIRLIDLGVRVFERAEVPKTGDSLAMARRLARSVRRLTRRRAHRLLRARRLLKREGVLQAADFD |
| | | ENGLIKSLPNTPWQLRAAALDRKLTPLEWSAVLLHLIKHRGYLSQRKNEGETADKELGALLKGVANNAHALQTGDFRTPAELALNKFEKES |
| | | GHIRNQRGDYSHTFSRKDLQAELILLFEKQKEFGNPHVSGGLKEGIETLLMTQRPALSGDAVQKMLGHCTFEPAEPKAAKNTYTAERFIWL |
| | | TKLNNLRILEQGSERPLTDTERATLMDEPYRKSKLTYAQARKLLGLEDTAFFKGLRYGKDNAEASTLMEMKAYHAISRALEKEGLKDKKSP |
| | | LNLSSELQDEIGTAFSLFKTDEDITGRLKDRVQPEILEALLKHISFDKFVQISLKALRRIVPLMEQGKRYDEACAEIYGDHYGKKNTEEKI |
| | | YLPPIPADEIRNPVVLRALSQARKVINGVVRRYGSPARIHIETAREVGKSFKDRKEIEKRQEENRKDREKAAAKFREYFPNFVGEPKSKDI |
| | | LKLRLYEQQHGKCLYSGKEINLVRLNEKGYVEIDHALPFSRTWDDSFNNKVLVLGSENQNKGNQTPYEYFNGKDNSREWQEFKARVETSRF |
| | | PRSKKQRILLQKFDEDGFKECNLNDTRYVNRFLCQFVADHILLTGKGKRRVFASNGQITNLLRGFWGLRKVRAENDRHHALDAVVVACSTV |
| | | AMQQKITRFVRYKEMNFDGKTIDKETGKVLHQKTHFPQPWEFFAQEVMIRVFGKPDGKPEFEEADTPEKLRTLLAEKLSSRPEAVHEYVT |
| | | PLFVSRAPNRKMSGAHKDTLRSAKRFVKHNEKISVKRVWLTEIKLADLENMVNYKNGREIELYEALKARLEAYGGNAKQAFDPKDNPFYKK |
| | | GGQLVKAVRVEKTQESGVLLNKKNAYTIADNGDMVRVDVFCKVDKKGKNQYFIVPIYAWQVAENILPDIDCKGYRIDDSYTFCFSLHKYDL |
| | | IAFQKDEKSKVEFAYYINCDSSNGRFYLAWHDKGSKEQQFRISTQNLVLIQKYQVNELGKEIRPCRLKKRPPVRSGKRTADGSEFESPKKK |
| | | RKVE* |
| 48 | Cas9- | GGGAAGCUCAGAAUAAACGCUCAACUUUGGCCGGAUCUGCCACCAUGGACAAGAAGUACUCCAUCGGCCUGGACAUCGGCACCAACUCCGU |
| | Cas9 | GGGCUGGGCCGUGAUCACCGACGAGUACAAGGUGCCCUCCAAGAAGUUCAAGGUGCUGGGCAACACCGACCGGCACUCCAUCAAGAAGAAC |
| | fusion- | CUGAUCGGCGCCCUGCUGUUCGACUCCGGCGAGACCGCCGAGGCCACCCGGCUGAAGCGGACCGCCCGGCGGCGGUACACCCGGCGGAAGA |
| | 71 | ACCGGAUCUGCUACCUGCAGGAGAUCUUCUCCAACGAGAUGGCCAAGGUGGACGACUCCUUCUUCCACCGGCUGGAGGAGUCCUUCCUGGU |
| | amino | GGAGGAGGACAAGAAGCACGAGCGGCACCCCAUCUUCGGCAACAUCGUGGACGAGGUGGCCUACCACGAGAAGUACCCCACCAUCUACCAC |
| | acid | CUGCGGAAGAAGCUGGUGGACUCCACCGACAAGGCCGACCUGCGGCUGAUCUACCUGGCCCUGGCCCACAUGAUCAAGUUCCGGGGCCACU |
| | residue | UCCUGAUCGAGGGCGACCUGAACCCCGACAACUCCGACGUGGACAAGCUGUUCAUCCAGCUGGUGCAGACCUACAACCAGCUGUUCGAGGA |
| | linker | GAACCCCAUCAACGCCUCCGGCGUGGACGCCAAGGCCAUCCUGUCCGCCCGGCUGUCCAAGUCCCGGCGGCUGGAGAACCUGAUCGCCCAG |
| | and | CUGCCCGGCGAGAAGAAGAACGGCCUGUUCGGCAACCUGAUCGCCCUGUCCCUGGGCCUGACCCCCAACUUCAAGUCCAACUUCGACCUGG |
| | HiBit | CCGAGGACGCCAAGCUGCAGCUGUCCAAGGACACCUACGACGACGACCUGGACAACCUGCUGGCCCAGAUCGGCGACCAGUACGCCGACCU |
| | tag | GUUCCUGGCCGCCAAGAACCUGUCCGACGCCAUCCUGCUGUCCGACAUCCUGCGGGUGAACACCGAGAUCACCAAGGCCCCCCUGUCCGCC |
| | (mRNA | UCCAUGAUCAAGCGGUACGACGAGCACCACCAGGACCUGACCCUGCUGAAGGCCCUGGUGCGGCAGCAGCUGCCCGAGAAGUACAAGGAGA |
| | O)- | UCUUCUUCGACCAGUCCAAGAACGGCUACGCCGGCUACAUCGACGGCGGCGCCUCCCAGGAGGAGUUCUACAAGUUCAUCAAGCCCAUCCU |
| | mRNA | GGAGAAGAUGGACGGCACCGAGGAGCUGCUGGUGAAGCUGAACCGGGAGGACCUGCUGCGGAAGCAGCGGACCUUCGACAACGGCUCCAUC |
| | sequence | CCCCACCAGAUCCACCUGGGCGAGCUGCACGCCAUCCUGCGGCGGCAGGAGGACUUCUACCCCUUCCUGAAGGACAACCGGGAGAAGAUCG |
| | | AGAAGAUCCUGACCUUCCGGAUCCCCUACUACGUGGGCCCCCUGGCCCGGGGCAACUCCCGGUUCGCCUGGAUGACCCGGAAGUCCGAGGA |
| | | GACCAUCACCCCCUGGAACUUCGAGGAGGUGGUGGACAAGGGCGCCUCCGCCCAGUCCUUCAUCGAGCGGAUGACCAACUUCGACAAGAAC |
| | | CUGCCCAACGAGAAGGUGCUGCCCAAGCACUCCCUGCUGUACGAGUACUUCACCGUGUACAACGAGCUGACCAAGGUGAAGUACGUGACCG |
| | | AGGGCAUGCGGAAGCCCGCCUUCCUGUCCGGCGAGCAGAAGAAGGCCAUCGUGGACCUGCUGUUCAAGACCAACCGGAAGGUGACCGUGAA |
| | | GCAGCUGAAGGAGGACUACUUCAAGAAGAUCGAGUGCUUCGACUCCGUGGAGAUCUCCGGCGUGGAGGACCGGUUCAACGCCUCCCUGGGC |
| | | ACCUACCACGACCUGCUGAAGAUCAUCAAGGACAAGGACUUCCUGGACAACGAGGAGAACGAGGACAUCCUGGAGGACAUCGUGCUGACCC |
| | | UGACCCUGUUCGAGGACCGGGAGAUGAUCGAGGAGCGGCUGAAGACCUACGCCCACCUGUUCGACGACAAGGUGAUGAAGCAGCUGAAGCG |
| | | GCGGCGGUACACCGGCUGGGGCCGGCUGUCCCGGAAGCUGAUCAACGGCAUCCGGGACAAGCAGUCCGGCAAGACCAUCCUGGACUUCCUG |
| | | AAGUCCGACGGCUUCGCCAACCGGAACUUCAUGCAGCUGAUCCACGACGACUCCCUGACCUUCAAGGAGGACAUCCAGAAGGCCCAGGUGU |
| | | CCGGCCAGGGCGACUCCCUGCACGAGCACAUCGCCAACCUGGCCGGCUCCCCCGCCAUCAAGAAGGGCAUCCUGCAGACCGUGAAGGUGGU |
| | | GGACGAGCUGGUGAAGGUGAUGGGCCGGCACAAGCCCGAGAACAUCGUGAUCGAGAUGGCCCGGGAGAACCAGACCACCCAGAAGGGCCAG |
| | | AAGAACUCCCGGGAGCGGAUGAAGCGGAUCGAGGAGGGCAUCAAGGAGCUGGGCUCCCAGAUCCUGAAGGAGCACCCCGUGGAGAACACCC |
| | | AGCUGCAGAACGAGAAGCUGUACCUGUACUACCUGCAGAACGGCCGGGACAUGUACGUGGACCAGGAGCUGGACAUCAACCGGCUGUCCGA |
| | | CUACGACGUGGACCACAUCGUGCCCCAGUCCUUCCUGAAGGACGACUCCAUCGACAACAAGGUGCUGACCCGGUCCGACAAGAACCGGGGC |
| | | AAGUCCGACAACGUGCCCUCCGAGGAGGUGGUGAAGAAGAUGAAGAACUACUGGCGGCAGCUGCUGAACGCCAAGCUGAUCACCCAGCGGA |
| | | AGUUCGACAACCUGACCAAGGCCGAGCGGGGCGGCCUGUCCGAGCUGGACAAGGCCGGCUUCAUCAAGCGGCAGCUGGUGGAGACCCGGCA |
| | | GAUCACCAAGCACGUGGCCCAGAUCCUGGACUCCCGGAUGAACACCAAGUACGACGAGAACGACAAGCUGAUCCGGGAGGUGAAGGUGAUC |
| | | ACCCUGAAGUCCAAGCUGGUGUCCGACUUCCGGAAGGACUUCCAGUUCUACAAGGUGCGGGAGAUCAACAACUACCACCACGCCCACGACG |
| | | CCUACCUGAACGCCGUGGUGGGCACCGCCCUGAUCAAGAAGUACCCCAAGCUGGAGUCCGAGUUCGUGUACGGCGACUACAAGGUGUACGA |
| | | CGUGCGGAAGAUGAUCGCCAAGUCCGAGCAGGAGAUCGGCAAGGCCACCGCCAAGUACUUCUUCUACUCCAACAUCAUGAACUUCUUCAAG |
| | | ACCGAGAUCACCCUGGCCAACGGCGAGAUCCGGAAGCGGCCCCUGAUCGAGACCAACGGCGAGACCGGCGAGAUCGUGUGGGACAAGGGCC |
| | | GGGACUUCGCCACCGUGCGGAAGGUGCUGUCCAUGCCCCAGGUGAACAUCGUGAAGAAGACCGAGGUGCAGACCGGCGGCUUCUCCAAGGA |
| | | GUCCAUCCUGCCCAAGCGGAACUCCGACAAGCUGAUCGCCCGGAAGAAGGACUGGGACCCCAAGAAGUACGGCGGCUUCGACUCCCCCACC |
| | | GUGGCCUACUCCGUGCUGGUGGUGGCCAAGGUGGAGAAGGGCAAGUCCAAGAAGCUGAAGUCCGUGAAGGAGCUGCUGGGCAUCACCAUCA |
| | | UGGAGCGGUCCUCCUUCGAGAAGAACCCCAUCGACUUCCUGGAGGCCAAGGGCUACAAGGAGGUGAAGAAGGACCUGAUCAUCAAGCUGCC |
| | | CAAGUACUCCCUGUUCGAGCUGGAGAACGGCCGGAAGCGGAUGCUGGCCUCCGCCGGCGAGCUGCAGAAGGGCAACGAGCUGGCCCUGCCC |
| | | UCCAAGUACGUGAACUUCCUGUACCUGGCCUCCCACUACGAGAAGCUGAAGGGCUCCCCCGAGGACAACGAGCAGAAGCAGCUGUUCGUGG |
| | | AGCAGCACAAGCACUACCUGGACGAGAUCAUCGAGCAGAUCUCCGAGUUCUCCAAGCGGGUGAUCCUGGCCGACGCCAACCUGGACAAGGU |
| | | GCUGUCCGCCUACAACAAGCACCGGGACAAGCCCAUCCGGGAGCAGGCCGAGAACAUCAUCCACCUGUUCACCCUGACCAACCUGGGCGCC |
| | | CCCGCCGCCUUCAAGUACUUCGACACCACCAUCGACAAGAAGCGGUACACCUCCACCAAGGAGGUGCUGGACGCCACCCUGAUCCACCAGU |
| | | CCAUCACCGGCCUGUACGAGACCCGGAUCGACCUGUCCCAGCUGGGCGGCGACGGCGCCCCCGAGUCCGCCACCGAGUCCGGCGGCACCUC |
| | | CACCGAGUCCGAGGGCUCCGCCGGCACCUCCACCGAGUCCGAGGGCUCCGCCGGCUCCGCCGGCUCCACCUCCACCGAGGAGGGCACCUCC |
| | | ACCGAGUCCGAGGGCUCCGCCGGCACCUCCACCGAGUCCGAGGGCUCCGCCGGCACCUCCGAGUCCGCCACCGGCUCCUCCUCCGGUGCCG |
| | | CCUUCAAGCCCAACCCCAUCAACUACAUCCUGGGCCUGGACAUCGGCAUCGCCUCCGUGGGCUGGGCCAUGGUGGAGAUCGACGAGGAGGA |
| | | GAACCCCAUCCGGCUGAUCGACCUGGGCGUGCGGGUGUUCGAGCGGGCCGAGGUGCCCAAGACCGGCGACUCCCUGGCCAUGGCCCGGCGG |
| | | CUGGCCCGGUCCGUGCGGCGGCUGACCCGGCGGCGGGCCCACCGGCUGCUGCGGGCCCGGCGGCUGCUGAAGCGGGAGGGCGUGCUGCAGG |
| | | CCGCCGACUUCGACGAGAACGGCCUGAUCAAGUCCCUGCCCAACACCCCCUGGCAGCUGCGGGCCGCCGCCCUGGACCGGAAGCUGACCCC |
| | | CCUGGAGUGGUCCGCCGUGCUGCUGCACCUGAUCAAGCACCGGGGCUACCUGUCCCAGCGGAAGAACGAGGGCGAGACCGCCGACAAGGAG |
| | | CUGGGCGCCCUGCUGAAGGGCGUGGCCAACAACGCCCACGCCCUGCAGACCGGCGACUUCCGGACCCCCGCCGAGCUGGCCCUGAACAAGU |
| | | UCGAGAAGGAGUCCGGCCACAUCCGGAACCAGCGGGGCGACUACUCCCACACCUUCUCCCGGAAGGACCUGCAGGCCGAGCUGAUCCUGCU |
| | | GUUCGAGAAGCAGAAGGAGUUCGGCAACCCCCACGUGUCCGGCGGCCUGAAGGAGGGCAUCGAGACCCUGCUGAUGACCCAGCGGCCCGCC |
| | | CUGUCCGGCGACGCCGUGCAGAAGAUGCUGGGCCACUGCACCUUCGAGCCCGCCGAGCCCAAGGCCGCCAAGAACACCUACACCGCCGAGC |
| | | GGUUCAUCUGGCUGACCAAGCUGAACAACCUGCGGAUCCUGGAGCAGGGCUCCGAGCGGCCCCUGACCGACACCGAGCGGGCCACCCUGAU |
| | | GGACGAGCCCUACCGGAAGUCCAAGCUGACCUACGCCCAGGCCCGGAAGCUGCUGGGCCUGGAGGACACCGCCUUCUUCAAGGGCCUGCGG |
| | | UACGGCAAGGACAACGCCGAGGCCUCCACCCUGAUGGAGAUGAAGGCCUACCACGCCAUCUCCCGGGCCCUGGAGAAGGAGGGCCUGAAGG |
| | | ACAAGAAGUCCCCCCUGAACCUGUCCUCCGAGCUGCAGGACGAGAUCGGCACCGCCUUCUCCCUGUUCAAGACCGACGAGGACAUCACCGG |
| | | CCGGCUGAAGGACCGGGUGCAGCCCGAGAUCCUGGAGGCCCUGCUGAAGCACAUCUCCUUCGACAAGUUCGUGCAGAUCUCCCUGAAGGCC |
| | | CUGCGGCGGAUCGUGCCCCUGAUGGAGCAGGGCAAGCGGUACGACGAGGCCUGCGCCGAGAUCUACGGCGACCACUACGGCAAGAAGAACA |
| | | CCGAGGAGAAGAUCUACCUGCCCCCCAUCCCCGCCGACGAGAUCCGGAACCCCGUGGUGCUGCGGGCCCUGUCCCAGGCCCGGAAGGUGAU |
| | | CAACGGCGUGGUGCGGCGGUACGGCUCCCCCGCCCGGAUCCACAUCGAGACCGCCCGGGAGGUGGGCAAGUCCUUCAAGGACCGGAAGGAG |
| | | AUCGAGAAGCGGCAGGAGGAGAACCGGAAGGACCGGGAGAAGGCCGCCGCCAAGUUCCGGGAGUACUUCCCCAACUUCGUGGGCGAGCCCA |
| | | AGUCCAAGGACAUCCUGAAGCUGCGGCUGUACGAGCAGCAGCACGGCAAGUGCCUGUACUCCGGCAAGGAGAUCAACCUGGUGCGGCUGAA |
| | | CGAGAAGGGCUACGUGGAGAUCGACCACGCCCUGCCCUUCUCCCGGACCUGGGACGACUCCUUCAACAACAAGGUGCUGGUGCUGGGCUCC |
| | | GAGAACCAGAACAAGGGCAACCAGACCCCCUACGAGUACUUCAACGGCAAGGACAACUCCCGGGAGUGGCAGGAGUUCAAGGCCCGGGUGG |
| | | AGACCUCCCGGUUCCCCCGGUCCAAGAAGCAGCGGAUCCUGCUGCAGAAGUUCGACGAGGACGGCUUCAAGGAGUGCAACCUGAACGACAC |
| | | CCGGUACGUGAACCGCUUCCUGUGCCAGUUCGUGGCCGACCACAUCCUGCUGACCGGCAAGGGCAAGCGGCGGGUGUUCGCCUCCAACGGC |
| | | CAGAUCACCAACCUGCUGCGGGGCUUCUGGGGCCUGCGGAAGGUGCGGGCCGAGAACGACCGGCACCACGCCCUGGACGCCGUGGUGGUGG |
| | | CCUGCUCCACCGUGGCCAUGCAGCAGAAGAUCACCCGGUUCGUGCGGUACAAGGAGAUGAACGCCUUCGACGGCAAGACCAUCGACAAGGA |
| | | GACCGGCAAGGUGCUGCACCAGAAGACCCACUUCCCCCAGCCCUGGGAGUUCUUCGCCCAGGAGGUGAUGAUCCGGGUGUUCGGCAAGCCC |
| | | GACGGCAAGCCCGAGUUCGAGGAGGCCGACACCCCCGAGAAGCUGCGGACCCUGCUGGCCGAGAAGCUGUCCUCCCGGCCCGAGGCCGUGC |
| | | ACGAGUACGUGACCCCCCUGUUCGUGUCCCGGGCCCCCAACCGGAAGAUGUCCGGCGCCCACAAGGACACCCUGCGGUCCGCCAAGCGGUU |
| | | CGUGAAGCACAACGAGAAGAUCUCCGUGAAGCGGGUGUGGCUGACCGAGAUCAAGCUGGCCGACCUGGAGAACAUGGUGAACUACAAGAAC |
| | | GGCCGGGAGAUCGAGCUGUACGAGGCCCUGAAGGCCCGGCUGGAGGCCUACGGCGGCAACGCCAAGCAGGCCUUCGACCCCAAGGACAACC |
| | | CCUUCUACAAGAAGGGCGGCCAGCUGGUGAAGGCCGUGCGGGUGGAGAAGACCCAGGAGUCCGGCGUGCUGCUGAACAAGAAGAACGCCUA |
| | | CACCAUCGCCGACAACGGCGACAUGGUGCGGGUGGACGUGUUCUGCAAGGUGGACAAGAAGGGCAAGAACCAGUACUUCAUCGUGCCCAUC |
| | | UACGCCUGGCAGGUGGCCGAGAACAUCCUGCCCGACAUCGACUGCAAGGGCUACCGGAUCGACGACUCCUACACCUUCUGCUUCUCCCUGC |
| | | ACAAGUACGACCUGAUCGCCUUCCAGAAGGACGAGAAGUCCAAGGUGGAGUUCGCCUACUACAUCAACUGCGACUCCUCCAACGGCCGGUU |
| | | CUACCUGGCCUGGCACGACAAGGGCUCCAAGGAGCAGCAGUUCCGGAUCUCCACCCAGAACCUGGUGCUGAUCCAGAAGUACCAGGUGAAC |
| | | GAGCUGGGCAAGGAGAUCCGGCCCUGCCGGCUGAAGAAGCGGCCCCCCGUGCGGUCCGGAAAGCGGACCGCCGACGGCUCCGGAGGAGGAA |
| | | GCCCGAAGAAGAAGAGAAAGGUCAGCGAAAGCGCAACACCGGAAAGCGUCAGCGGAUGGAGACUGUUCAAGAAGAUCAGCUAGCUAGCACC |
| | | AGCCUCAAGAACACCCGAAUGGAGUCUCUAAGCUACAUAAUACCAACUUACACUUUACAAAAUGUUGUCCCCCAAAAUGUAGCCAUUCGUA |
| | | UCUGCUCCUAAUAAAAAGAAAGUUUCUUCACAUUCUCUCGAGAAAAAAAAAAAAUGGAAAAAAAAAAAACGGAAAAAAAAAAAAGGUAAAA |
| | | AAAAAAAAUAUAAAAAAAAAAAACAUAAAAAAAAAAAACGAAAAAAAAAAAACGUAAAAAAAAAAAACUCAAAAAAAAAAAAGAUAAAAAA |
| | | AAAAAACCUAAAAAAAAAAAAUGUAAAAAAAAAAAAGGGAAAAAAAAAAAACGCAAAAAAAAAAAACACAAAAAAAAAAAAUGCAAAAAAA |
| | | AAAAAUCGAAAAAAAAAAAAUCUAAAAAAAAAAAACGAAAAAAAAAAAACCCAAAAAAAAAAAAGACAAAAAAAAAAAAUAGAAAAAAAAA |
| | | AAAGUUAAAAAAAAAAAACUGAAAAAAAAAAAAUUUAAAAAAAAAAAAUCUAG |
| 49 | Cas9- | AUGGACAAGAAGUACUCCAUCGGCCUGGACAUCGGCACCAACUCCGUGGGCUGGGCCGUGAUCACCGACGAGUACAAGGUGCCCUCCAAGA |
| | Cas9 | AGUUCAAGGUGCUGGGCAACACCGACCGGCACUCCAUCAAGAAGAACCUGAUCGGCGCCCUGCUGUUCGACUCCGGCGAGACCGCCGAGGC |
| | fusion- | CACCCGGCUGAAGCGGACCGCCCGGCGGCGGUACACCCGGCGGAAGAACCGGAUCUGCUACCUGCAGGAGAUCUUCUCCAACGAGAUGGCC |
| | 71 | AAGGUGGACGACUCCUUCUUCCACCGGCUGGAGGAGUCCUUCCUGGUGGAGGAGGACAAGAAGCACGAGCGGCACCCCAUCUUCGGCAACA |
| | amino | UCGUGGACGAGGUGGCCUACCACGAGAAGUACCCCACCAUCUACCACCUGCGGAAGAAGCUGGUGGACUCCACCGACAAGGCCGACCUGCG |
| | acid | GCUGAUCUACCUGGCCCUGGCCCACAUGAUCAAGUUCCGGGGCCACUUCCUGAUCGAGGGCGACCUGAACCCCGACAACUCCGACGUGGAC |
| | residue | AAGCUGUUCAUCCAGCUGGUGCAGACCUACAACCAGCUGUUCGAGGAGAACCCCAUCAACGCCUCCGGCGUGGACGCCAAGGCCAUCCUGU |
| | linker | CCGCCCGGCUGUCCAAGUCCCGGCGGCUGGAGAACCUGAUCGCCCAGCUGCCCGGCGAGAAGAAGAACGGCCUGUUCGGCAACCUGAUCGC |
| | and | CCUGUCCCUGGGCCUGACCCCCAACUUCAAGUCCAACUUCGACCUGGCCGAGGACGCCAAGCUGCAGCUGUCCAAGGACACCUACGACGAC |
| | HiBit | GACCUGGACAACCUGCUGGCCCAGAUCGGCGACCAGUACGCCGACCUGUUCCUGGCCGCCAAGAACCUGUCCGACGCCAUCCUGCUGUCCG |
| | tag | ACAUCCUGCGGGUGAACACCGAGAUCACCAAGGCCCCCCUGUCCGCCUCCAUGAUCAAGCGGUACGACGAGCACCACCAGGACCUGACCCU |
| | (mRNA | GCUGAAGGCCCUGGUGCGGCAGCAGCUGCCCGAGAAGUACAAGGAGAUCUUCUUCGACCAGUCCAAGAACGGCUACGCCGGCUACAUCGAC |
| | O)-ORF | GGCGGCGCCUCCCAGGAGGAGUUCUACAAGUUCAUCAAGCCCAUCCUGGAGAAGAUGGACGGCACCGAGGAGCUGCUGGUGAAGCUGAACC |
| | sequence | GGGAGGACCUGCUGCGGAAGCAGCGGACCUUCGACAACGGCUCCAUCCCCCACCAGAUCCACCUGGGCGAGCUGCACGCCAUCCUGCGGCG |
| | | GCAGGAGGACUUCUACCCCUUCCUGAAGGACAACCGGGAGAAGAUCGAGAAGAUCCUGACCUUCCGGAUCCCCUACUACGUGGGCCCCCUG |
| | | GCCCGGGGCAACUCCCGGUUCGCCUGGAUGACCCGGAAGUCCGAGGAGACCAUCACCCCCUGGAACUUCGAGGAGGUGGUGGACAAGGGCG |
| | | CCUCCGCCCAGUCCUUCAUCGAGCGGAUGACCAACUUCGACAAGAACCUGCCCAACGAGAAGGUGCUGCCCAAGCACUCCCUGCUGUACGA |
| | | GUACUUCACCGUGUACAACGAGCUGACCAAGGUGAAGUACGUGACCGAGGGCAUGCGGAAGCCCGCCUUCCUGUCCGGCGAGCAGAAGAAG |
| | | GCCAUCGUGGACCUGCUGUUCAAGACCAACCGGAAGGUGACCGUGAAGCAGCUGAAGGAGGACUACUUCAAGAAGAUCGAGUGCUUCGACU |
| | | CCGUGGAGAUCUCCGGCGUGGAGGACCGGUUCAACGCCUCCCUGGGCACCUACCACGACCUGCUGAAGAUCAUCAAGGACAAGGACUUCCU |
| | | GGACAACGAGGAGAACGAGGACAUCCUGGAGGACAUCGUGCUGACCCUGACCCUGUUCGAGGACCGGGAGAUGAUCGAGGAGCGGCUGAAG |
| | | ACCUACGCCCACCUGUUCGACGACAAGGUGAUGAAGCAGCUGAAGCGGCGGCGGUACACCGGCUGGGGCCGGCUGUCCCGGAAGCUGAUCA |
| | | ACGGCAUCCGGGACAAGCAGUCCGGCAAGACCAUCCUGGACUUCCUGAAGUCCGACGGCUUCGCCAACCGGAACUUCAUGCAGCUGAUCCA |
| | | CGACGACUCCCUGACCUUCAAGGAGGACAUCCAGAAGGCCCAGGUGUCCGGCCAGGGCGACUCCCUGCACGAGCACAUCGCCAACCUGGCC |
| | | GGCUCCCCCGCCAUCAAGAAGGGCAUCCUGCAGACCGUGAAGGUGGUGGACGAGCUGGUGAAGGUGAUGGGCCGGCACAAGCCCGAGAACA |
| | | UCGUGAUCGAGAUGGCCCGGGAGAACCAGACCACCCAGAAGGGCCAGAAGAACUCCCGGGAGCGGAUGAAGCGGAUCGAGGAGGGCAUCAA |
| | | GGAGCUGGGCUCCCAGAUCCUGAAGGAGCACCCCGUGGAGAACACCCAGCUGCAGAACGAGAAGCUGUACCUGUACUACCUGCAGAACGGC |
| | | CGGGACAUGUACGUGGACCAGGAGCUGGACAUCAACCGGCUGUCCGACUACGACGUGGACCACAUCGUGCCCCAGUCCUUCCUGAAGGACG |
| | | ACUCCAUCGACAACAAGGUGCUGACCCGGUCCGACAAGAACCGGGGCAAGUCCGACAACGUGCCCUCCGAGGAGGUGGUGAAGAAGAUGAA |
| | | GAACUACUGGCGGCAGCUGCUGAACGCCAAGCUGAUCACCCAGCGGAAGUUCGACAACCUGACCAAGGCCGAGCGGGGCGGCCUGUCCGAG |
| | | CUGGACAAGGCCGGCUUCAUCAAGCGGCAGCUGGUGGAGACCCGGCAGAUCACCAAGCACGUGGCCCAGAUCCUGGACUCCCGGAUGAACA |
| | | CCAAGUACGACGAGAACGACAAGCUGAUCCGGGAGGUGAAGGUGAUCACCCUGAAGUCCAAGCUGGUGUCCGACUUCCGGAAGGACUUCCA |
| | | GUUCUACAAGGUGCGGGAGAUCAACAACUACCACCACGCCCACGACGCCUACCUGAACGCCGUGGUGGGCACCGCCCUGAUCAAGAAGUAC |
| | | CCCAAGCUGGAGUCCGAGUUCGUGUACGGCGACUACAAGGUGUACGACGUGCGGAAGAUGAUCGCCAAGUCCGAGCAGGAGAUCGGCAAGG |
| | | CCACCGCCAAGUACUUCUUCUACUCCAACAUCAUGAACUUCUUCAAGACCGAGAUCACCCUGGCCAACGGCGAGAUCCGGAAGCGGCCCCU |
| | | GAUCGAGACCAACGGCGAGACCGGCGAGAUCGUGUGGGACAAGGGCCGGGACUUCGCCACCGUGCGGAAGGUGCUGUCCAUGCCCCAGGUG |
| | | AACAUCGUGAAGAAGACCGAGGUGCAGACCGGCGGCUUCUCCAAGGAGUCCAUCCUGCCCAAGCGGAACUCCGACAAGCUGAUCGCCCGGA |
| | | AGAAGGACUGGGACCCCAAGAAGUACGGCGGCUUCGACUCCCCCACCGUGGCCUACUCCGUGCUGGUGGUGGCCAAGGUGGAGAAGGGCAA |
| | | GUCCAAGAAGCUGAAGUCCGUGAAGGAGCUGCUGGGCAUCACCAUCAUGGAGCGGUCCUCCUUCGAGAAGAACCCCAUCGACUUCCUGGAG |
| | | GCCAAGGGCUACAAGGAGGUGAAGAAGGACCUGAUCAUCAAGCUGCCCAAGUACUCCCUGUUCGAGCUGGAGAACGGCCGGAAGCGGAUGC |
| | | UGGCCUCCGCCGGCGAGCUGCAGAAGGGCAACGAGCUGGCCCUGCCCUCCAAGUACGUGAACUUCCUGUACCUGGCCUCCCACUACGAGAA |
| | | GCUGAAGGGCUCCCCCGAGGACAACGAGCAGAAGCAGCUGUUCGUGGAGCAGCACAAGCACUACCUGGACGAGAUCAUCGAGCAGAUCUCC |
| | | GAGUUCUCCAAGCGGGUGAUCCUGGCCGACGCCAACCUGGACAAGGUGCUGUCCGCCUACAACAAGCACCGGGACAAGCCCAUCCGGGAGC |
| | | AGGCCGAGAACAUCAUCCACCUGUUCACCCUGACCAACCUGGGCGCCCCCGCCGCCUUCAAGUACUUCGACACCACCAUCGACAAGAAGCG |
| | | GUACACCUCCACCAAGGAGGUGCUGGACGCCACCCUGAUCCACCAGUCCAUCACCGGCCUGUACGAGACCCGGAUCGACCUGUCCCAGCUG |
| | | GGCGGCGACGGCGCCCCCGAGUCCGCCACCGAGUCCGGCGGCACCUCCACCGAGUCCGAGGGCUCCGCCGGCACCUCCACCGAGUCCGAGG |
| | | GCUCCGCCGGCUCCGCCGGCUCCACCUCCACCGAGGAGGGCACCUCCACCGAGUCCGAGGGCUCCGCCGGCACCUCCACCGAGUCCGAGGG |
| | | CUCCGCCGGCACCUCCGAGUCCGCCACCGGCUCCUCCUCCGGUGCCGCCUUCAAGCCCAACCCCAUCAACUACAUCCUGGGCCUGGACAUC |
| | | GGCAUCGCCUCCGUGGGCUGGGCCAUGGUGGAGAUCGACGAGGAGGAGAACCCCAUCCGGCUGAUCGACCUGGGCGUGCGGGUGUUCGAGC |
| | | GGGCCGAGGUGCCCAAGACCGGCGACUCCCUGGCCAUGGCCCGGCGGCUGGCCCGGUCCGUGCGGCGGCUGACCCGGCGGCGGGCCCACCG |
| | | GCUGCUGCGGGCCCGGCGGCUGCUGAAGCGGGAGGGCGUGCUGCAGGCCGCCGACUUCGACGAGAACGGCCUGAUCAAGUCCCUGCCCAAC |
| | | ACCCCCUGGCAGCUGCGGGCCGCCGCCCUGGACCGGAAGCUGACCCCCCUGGAGUGGUCCGCCGUGCUGCUGCACCUGAUCAAGCACCGGG |
| | | GCUACCUGUCCCAGCGGAAGAACGAGGGCGAGACCGCCGACAAGGAGCUGGGCGCCCUGCUGAAGGGCGUGGCCAACAACGCCCACGCCCU |
| | | GCAGACCGGCGACUUCCGGACCCCCGCCGAGCUGGCCCUGAACAAGUUCGAGAAGGAGUCCGGCCACAUCCGGAACCAGCGGGGCGACUAC |
| | | UCCCACACCUUCUCCCGGAAGGACCUGCAGGCCGAGCUGAUCCUGCUGUUCGAGAAGCAGAAGGAGUUCGGCAACCCCCACGUGUCCGGCG |
| | | GCCUGAAGGAGGGCAUCGAGACCCUGCUGAUGACCCAGCGGCCCGCCCUGUCCGGCGACGCCGUGCAGAAGAUGCUGGGCCACUGCACCUU |
| | | CGAGCCCGCCGAGCCCAAGGCCGCCAAGAACACCUACACCGCCGAGCGGUUCAUCUGGCUGACCAAGCUGAACAACCUGCGGAUCCUGGAG |
| | | CAGGGCUCCGAGCGGCCCCUGACCGACACCGAGCGGGCCACCCUGAUGGACGAGCCCUACCGGAAGUCCAAGCUGACCUACGCCCAGGCCC |
| | | GGAAGCUGCUGGGCCUGGAGGACACCGCCUUCUUCAAGGGCCUGCGGUACGGCAAGGACAACGCCGAGGCCUCCACCCUGAUGGAGAUGAA |
| | | GGCCUACCACGCCAUCUCCCGGGCCCUGGAGAAGGAGGGCCUGAAGGACAAGAAGUCCCCCCUGAACCUGUCCUCCGAGCUGCAGGACGAG |
| | | AUCGGCACCGCCUUCUCCCUGUUCAAGACCGACGAGGACAUCACCGGCCGGCUGAAGGACCGGGUGCAGCCCGAGAUCCUGGAGGCCCUGC |
| | | UGAAGCACAUCUCCUUCGACAAGUUCGUGCAGAUCUCCCUGAAGGCCCUGCGGCGGAUCGUGCCCCUGAUGGAGCAGGGCAAGCGGUACGA |
| | | CGAGGCCUGCGCCGAGAUCUACGGCGACCACUACGGCAAGAAGAACACCGAGGAGAAGAUCUACCUGCCCCCCAUCCCCGCCGACGAGAUC |
| | | CGGAACCCCGUGGUGCUGCGGGCCCUGUCCCAGGCCCGGAAGGUGAUCAACGGCGUGGUGCGGCGGUACGGCUCCCCCGCCCGGAUCCACA |
| | | UCGAGACCGCCCGGGAGGUGGGCAAGUCCUUCAAGGACCGGAAGGAGAUCGAGAAGCGGCAGGAGGAGAACCGGAAGGACCGGGAGAAGGC |
| | | CGCCGCCAAGUUCCGGGAGUACUUCCCCAACUUCGUGGGCGAGCCCAAGUCCAAGGACAUCCUGAAGCUGCGGCUGUACGAGCAGCAGCAC |
| | | GGCAAGUGCCUGUACUCCGGCAAGGAGAUCAACCUGGUGCGGCUGAACGAGAAGGGCUACGUGGAGAUCGACCACGCCCUGCCCUUCUCCC |
| | | GGACCUGGGACGACUCCUUCAACAACAAGGUGCUGGUGCUGGGCUCCGAGAACCAGAACAAGGGCAACCAGACCCCCUACGAGUACUUCAA |
| | | CGGCAAGGACAACUCCCGGGAGUGGCAGGAGUUCAAGGCCCGGGUGGAGACCUCCCGGUUCCCCCGGUCCAAGAAGCAGCGGAUCCUGCUG |
| | | CAGAAGUUCGACGAGGACGGCUUCAAGGAGUGCAACCUGAACGACACCCGGUACGUGAACCGCUUCCUGUGCCAGUUCGUGGCCGACCACA |
| | | UCCUGCUGACCGGCAAGGGCAAGCGGCGGGUGUUCGCCUCCAACGGCCAGAUCACCAACCUGCUGCGGGGCUUCUGGGGCCUGCGGAAGGU |
| | | GCGGGCCGAGAACGACCGGCACCACGCCCUGGACGCCGUGGUGGUGGCCUGCUCCACCGUGGCCAUGCAGCAGAAGAUCACCCGGUUCGUG |
| | | CGGUACAAGGAGAUGAACGCCUUCGACGGCAAGACCAUCGACAAGGAGACCGGCAAGGUGCUGCACCAGAAGACCCACUUCCCCCAGCCCU |
| | | GGGAGUUCUUCGCCCAGGAGGUGAUGAUCCGGGUGUUCGGCAAGCCCGACGGCAAGCCCGAGUUCGAGGAGGCCGACACCCCCGAGAAGCU |
| | | GCGGACCCUGCUGGCCGAGAAGCUGUCCUCCCGGCCCGAGGCCGUGCACGAGUACGUGACCCCCCUGUUCGUGUCCCGGGCCCCCAACCGG |
| | | AAGAUGUCCGGCGCCCACAAGGACACCCUGCGGUCCGCCAAGCGGUUCGUGAAGCACAACGAGAAGAUCUCCGUGAAGCGGGUGUGGCUGA |
| | | CCGAGAUCAAGCUGGCCGACCUGGAGAACAUGGUGAACUACAAGAACGGCCGGGAGAUCGAGCUGUACGAGGCCCUGAAGGCCCGGCUGGA |
| | | GGCCUACGGCGGCAACGCCAAGCAGGCCUUCGACCCCAAGGACAACCCCUUCUACAAGAAGGGCGGCCAGCUGGUGAAGGCCGUGCGGGUG |
| | | GAGAAGACCCAGGAGUCCGGCGUGCUGCUGAACAAGAAGAACGCCUACACCAUCGCCGACAACGGCGACAUGGUGCGGGUGGACGUGUUCU |
| | | GCAAGGUGGACAAGAAGGGCAAGAACCAGUACUUCAUCGUGCCCAUCUACGCCUGGCAGGUGGCCGAGAACAUCCUGCCCGACAUCGACUG |
| | | CAAGGGCUACCGGAUCGACGACUCCUACACCUUCUGCUUCUCCCUGCACAAGUACGACCUGAUCGCCUUCCAGAAGGACGAGAAGUCCAAG |
| | | GUGGAGUUCGCCUACUACAUCAACUGCGACUCCUCCAACGGCCGGUUCUACCUGGCCUGGCACGACAAGGGCUCCAAGGAGCAGCAGUUCC |
| | | GGAUCUCCACCCAGAACCUGGUGCUGAUCCAGAAGUACCAGGUGAACGAGCUGGGCAAGGAGAUCCGGCCCUGCCGGCUGAAGAAGCGGCC |
| | | CCCCGUGCGGUCCGGAAAGCGGACCGCCGACGGCUCCGGAGGAGGAAGCCCGAAGAAGAAGAGAAAGGUCAGCGAAAGCGCAACACCGGAA |
| | | AGCGUCAGCGGAUGGAGACUGUUCAAGAAGAUCAGCUAG |
| 50 | Cas9- | MDKKYSIGLDIGTNSVGWAVITDEYKVPSKKFKVLGNTDRHSIKKNLIGALLFDSGETAEATRLKRTARRRYTRRKNRICYLQEIFSNEMA |
| | Cas9 | KVDDSFFHRLEESFLVEEDKKHERHPIFGNIVDEVAYHEKYPTIYHLRKKLVDSTDKADLRLIYLALAHMIKFRGHFLIEGDLNPDNSDVD |
| | fusion- | KLFIQLVQTYNQLFEENPINASGVDAKAILSARLSKSRRLENLIAQLPGEKKNGLFGNLIALSLGLTPNFKSNFDLAEDAKLQLSKDTYDD |
| | 71 | DLDNLLAQIGDQYADLFLAAKNLSDAILLSDILRVNTEITKAPLSASMIKRYDEHHQDLTLLKALVRQQLPEKYKEIFFDQSKNGYAGYID |
| | amino | GGASQEEFYKFIKPILEKMDGTEELLVKLNREDLLRKQRTFDNGSIPHQIHLGELHAILRRQEDFYPFLKDNREKIEKILTFRIPYYVGPL |
| | acid | ARGNSRFAWMTRKSEETITPWNFEEVVDKGASAQSFIERMTNFDKNLPNEKVLPKHSLLYEYFTVYNELTKVKYVTEGMRKPAFLSGEQKK |
| | residue | AIVDLLFKTNRKVTVKQLKEDYFKKIECFDSVEISGVEDRFNASLGTYHDLLKIIKDKDFLDNEENEDILEDIVLTLTLFEDREMIEERLK |
| | linker | TYAHLFDDKVMKQLKRRRYTGWGRLSRKLINGIRDKQSGKTILDFLKSDGFANRNFMQLIHDDSLTFKEDIQKAQVSGQGDSLHEHIANLA |
| | and | GSPAIKKGILQTVKVVDELVKVMGRHKPENIVIEMARENQTTQKGQKNSRERMKRIEEGIKELGSQILKEHPVENTQLQNEKLYLYYLQNG |
| | HiBit | RDMYVDQELDINRLSDYDVDHIVPQSFLKDDSIDNKVLTRSDKNRGKSDNVPSEEVVKKMKNYWRQLLNAKLITQRKFDNLTKAERGGLSE |
| | tag | LDKAGFIKRQLVETRQITKHVAQILDSRMNTKYDENDKLIREVKVITLKSKLVSDFRKDFQFYKVREINNYHHAHDAYLNAVVGTALIKKY |
| | (mRNA | PKLESEFVYGDYKVYDVRKMIAKSEQEIGKATAKYFFYSNIMNFFKTEITLANGEIRKRPLIETNGETGEIVWDKGRDFATVRKVLSMPQV |
| | O)- | NIVKKTEVQTGGFSKESILPKRNSDKLIARKKDWDPKKYGGFDSPTVAYSVLVVAKVEKGKSKKLKSVKELLGITIMERSSFEKNPIDFLE |
| | amino | AKGYKEVKKDLIIKLPKYSLFELENGRKRMLASAGELQKGNELALPSKYVNFLYLASHYEKLKGSPEDNEQKQLFVEQHKHYLDEIIEQIS |
| | acid | EFSKRVILADANLDKVLSAYNKHRDKPIREQAENIIHLFTLTNLGAPAAFKYFDTTIDKKRYTSTKEVLDATLIHQSITGLYETRIDLSQL |
| | sequence | GGDGAPESATESGGTSTESEGSAGTSTESEGSAGSAGSTSTEEGTSTESEGSAGTSTESEGSAGTSESATGSSSGAAFKPNPINYILGLDI |
| | | GIASVGWAMVEIDEEENPIRLIDLGVRVFERAEVPKTGDSLAMARRLARSVRRLTRRRAHRLLRARRLLKREGVLQAADFDENGLIKSLPN |
| | | TPWQLRAAALDRKLTPLEWSAVLLHLIKHRGYLSQRKNEGETADKELGALLKGVANNAHALQTGDFRTPAELALNKFEKESGHIRNQRGDY |
| | | SHTFSRKDLQAELILLFEKQKEFGNPHVSGGLKEGIETLLMTQRPALSGDAVQKMLGHCTFEPAEPKAAKNTYTAERFIWLTKLNNLRILE |
| | | QGSERPLTDTERATLMDEPYRKSKLTYAQARKLLGLEDTAFFKGLRYGKDNAEASTLMEMKAYHAISRALEKEGLKDKKSPLNLSSELQDE |
| | | IGTAFSLFKTDEDITGRLKDRVQPEILEALLKHISFDKFVQISLKALRRIVPLMEQGKRYDEACAEIYGDHYGKKNTEEKIYLPPIPADEI |
| | | RNPVVLRALSQARKVINGVVRRYGSPARIHIETAREVGKSFKDRKEIEKRQEENRKDREKAAAKFREYFPNFVGEPKSKDILKLRLYEQQH |
| | | GKCLYSGKEINLVRLNEKGYVEIDHALPFSRTWDDSFNNKVLVLGSENQNKGNQTPYEYFNGKDNSREWQEFKARVETSRFPRSKKQRILL |
| | | QKFDEDGFKECNLNDTRYVNRFLCQFVADHILLTGKGKRRVFASNGQITNLLRGFWGLRKVRAENDRHHALDAVVVACSTVAMQQKITRFV |
| | | RYKEMNAFDGKTIDKETGKVLHQKTHFPQPWEFFAQEVMIRVFGKPDGKPEFEEADTPEKLRTLLAEKLSSRPEAVHEYVTPLFVSRAPNR |
| | | KMSGAHKDTLRSAKRFVKHNEKISVKRVWLTEIKLADLENMVNYKNGREIELYEALKARLEAYGGNAKQAFDPKDNPFYKKGGQLVKAVRV |
| | | EKTQESGVLLNKKNAYTIADNGDMVRVDVFCKVDKKGKNQYFIVPIYAWQVAENILPDIDCKGYRIDDSYTFCFSLHKYDLIAFQKDEKSK |
| | | VEFAYYINCDSSNGRFYLAWHDKGSKEQQFRISTQNLVLIQKYQVNELGKEIRPCRLKKRPPVRSGKRTADGSGGGSPKKKRKVSESATPE |
| | | SVSGWRLFKKIS* |
| 51 | Cas9- | AUGGACAAGAAGUACUCCAUCGGCCUGGACAUCGGCACCAACUCCGUGGGCUGGGCCGUGAUCACCGACGAGUACAAGGUGCCCUCCAAGA |
| | Cas9 | AGUUCAAGGUGCUGGGCAACACCGACCGGCACUCCAUCAAGAAGAACCUGAUCGGCGCCCUGCUGUUCGACUCCGGCGAGACCGCCGAGGC |
| | fusion- | CACCCGGCUGAAGCGGACCGCCCGGCGGCGGUACACCCGGCGGAAGAACCGGAUCUGCUACCUGCAGGAGAUCUUCUCCAACGAGAUGGCC |
| | 71 | AAGGUGGACGACUCCUUCUUCCACCGGCUGGAGGAGUCCUUCCUGGUGGAGGAGGACAAGAAGCACGAGCGGCACCCCAUCUUCGGCAACA |
| | amino | UCGUGGACGAGGUGGCCUACCACGAGAAGUACCCCACCAUCUACCACCUGCGGAAGAAGCUGGUGGACUCCACCGACAAGGCCGACCUGCG |
| | acid | GCUGAUCUACCUGGCCCUGGCCCACAUGAUCAAGUUCCGGGGCCACUUCCUGAUCGAGGGCGACCUGAACCCCGACAACUCCGACGUGGAC |
| | residual | AAGCUGUUCAUCCAGCUGGUGCAGACCUACAACCAGCUGUUCGAGGAGAACCCCAUCAACGCCUCCGGCGUGGACGCCAAGGCCAUCCUGU |
| | linker | CCGCCCGGCUGUCCAAGUCCCGGCGGCUGGAGAACCUGAUCGCCCAGCUGCCCGGCGAGAAGAAGAACGGCCUGUUCGGCAACCUGAUCGC |
| | (mRNA | CCUGUCCCUGGGCCUGACCCCCAACUUCAAGUCCAACUUCGACCUGGCCGAGGACGCCAAGCUGCAGCUGUCCAAGGACACCUACGACGAC |
| | O)- | GACCUGGACAACCUGCUGGCCCAGAUCGGCGACCAGUACGCCGACCUGUUCCUGGCCGCCAAGAACCUGUCCGACGCCAUCCUGCUGUCCG |
| | mRNA | ACAUCCUGCGGGUGAACACCGAGAUCACCAAGGCCCCCCUGUCCGCCUCCAUGAUCAAGCGGUACGACGAGCACCACCAGGACCUGACCCU |
| | sequence | GCUGAAGGCCCUGGUGCGGCAGCAGCUGCCCGAGAAGUACAAGGAGAUCUUCUUCGACCAGUCCAAGAACGGCUACGCCGGCUACAUCGAC |
| | | GGCGGCGCCUCCCAGGAGGAGUUCUACAAGUUCAUCAAGCCCAUCCUGGAGAAGAUGGACGGCACCGAGGAGCUGCUGGUGAAGCUGAACC |
| | | GGGAGGACCUGCUGCGGAAGCAGCGGACCUUCGACAACGGCUCCAUCCCCCACCAGAUCCACCUGGGCGAGCUGCACGCCAUCCUGCGGCG |
| | | GCAGGAGGACUUCUACCCCUUCCUGAAGGACAACCGGGAGAAGAUCGAGAAGAUCCUGACCUUCCGGAUCCCCUACUACGUGGGCCCCCUG |
| | | GCCCGGGGCAACUCCCGGUUCGCCUGGAUGACCCGGAAGUCCGAGGAGACCAUCACCCCCUGGAACUUCGAGGAGGUGGUGGACAAGGGCG |
| | | CCUCCGCCCAGUCCUUCAUCGAGCGGAUGACCAACUUCGACAAGAACCUGCCCAACGAGAAGGUGCUGCCCAAGCACUCCCUGCUGUACGA |
| | | GUACUUCACCGUGUACAACGAGCUGACCAAGGUGAAGUACGUGACCGAGGGCAUGCGGAAGCCCGCCUUCCUGUCCGGCGAGCAGAAGAAG |
| | | GCCAUCGUGGACCUGCUGUUCAAGACCAACCGGAAGGUGACCGUGAAGCAGCUGAAGGAGGACUACUUCAAGAAGAUCGAGUGCUUCGACU |
| | | CCGUGGAGAUCUCCGGCGUGGAGGACCGGUUCAACGCCUCCCUGGGCACCUACCACGACCUGCUGAAGAUCAUCAAGGACAAGGACUUCCU |
| | | GGACAACGAGGAGAACGAGGACAUCCUGGAGGACAUCGUGCUGACCCUGACCCUGUUCGAGGACCGGGAGAUGAUCGAGGAGCGGCUGAAG |
| | | ACCUACGCCCACCUGUUCGACGACAAGGUGAUGAAGCAGCUGAAGCGGCGGCGGUACACCGGCUGGGGCCGGCUGUCCCGGAAGCUGAUCA |
| | | ACGGCAUCCGGGACAAGCAGUCCGGCAAGACCAUCCUGGACUUCCUGAAGUCCGACGGCUUCGCCAACCGGAACUUCAUGCAGCUGAUCCA |
| | | CGACGACUCCCUGACCUUCAAGGAGGACAUCCAGAAGGCCCAGGUGUCCGGCCAGGGCGACUCCCUGCACGAGCACAUCGCCAACCUGGCC |
| | | GGCUCCCCCGCCAUCAAGAAGGGCAUCCUGCAGACCGUGAAGGUGGUGGACGAGCUGGUGAAGGUGAUGGGCCGGCACAAGCCCGAGAACA |
| | | UCGUGAUCGAGAUGGCCCGGGAGAACCAGACCACCCAGAAGGGCCAGAAGAACUCCCGGGAGCGGAUGAAGCGGAUCGAGGAGGGCAUCAA |
| | | GGAGCUGGGCUCCCAGAUCCUGAAGGAGCACCCCGUGGAGAACACCCAGCUGCAGAACGAGAAGCUGUACCUGUACUACCUGCAGAACGGC |
| | | CGGGACAUGUACGUGGACCAGGAGCUGGACAUCAACCGGCUGUCCGACUACGACGUGGACCACAUCGUGCCCCAGUCCUUCCUGAAGGACG |
| | | ACUCCAUCGACAACAAGGUGCUGACCCGGUCCGACAAGAACCGGGGCAAGUCCGACAACGUGCCCUCCGAGGAGGUGGUGAAGAAGAUGAA |
| | | GAACUACUGGCGGCAGCUGCUGAACGCCAAGCUGAUCACCCAGCGGAAGUUCGACAACCUGACCAAGGCCGAGCGGGGCGGCCUGUCCGAG |
| | | CUGGACAAGGCCGGCUUCAUCAAGCGGCAGCUGGUGGAGACCCGGCAGAUCACCAAGCACGUGGCCCAGAUCCUGGACUCCCGGAUGAACA |
| | | CCAAGUACGACGAGAACGACAAGCUGAUCCGGGAGGUGAAGGUGAUCACCCUGAAGUCCAAGCUGGUGUCCGACUUCCGGAAGGACUUCCA |
| | | GUUCUACAAGGUGCGGGAGAUCAACAACUACCACCACGCCCACGACGCCUACCUGAACGCCGUGGUGGGCACCGCCCUGAUCAAGAAGUAC |
| | | CCCAAGCUGGAGUCCGAGUUCGUGUACGGCGACUACAAGGUGUACGACGUGCGGAAGAUGAUCGCCAAGUCCGAGCAGGAGAUCGGCAAGG |
| | | CCACCGCCAAGUACUUCUUCUACUCCAACAUCAUGAACUUCUUCAAGACCGAGAUCACCCUGGCCAACGGCGAGAUCCGGAAGCGGCCCCU |
| | | GAUCGAGACCAACGGCGAGACCGGCGAGAUCGUGUGGGACAAGGGCCGGGACUUCGCCACCGUGCGGAAGGUGCUGUCCAUGCCCCAGGUG |
| | | AACAUCGUGAAGAAGACCGAGGUGCAGACCGGCGGCUUCUCCAAGGAGUCCAUCCUGCCCAAGCGGAACUCCGACAAGCUGAUCGCCCGGA |
| | | AGAAGGACUGGGACCCCAAGAAGUACGGCGGCUUCGACUCCCCCACCGUGGCCUACUCCGUGCUGGUGGUGGCCAAGGUGGAGAAGGGCAA |
| | | GUCCAAGAAGCUGAAGUCCGUGAAGGAGCUGCUGGGCAUCACCAUCAUGGAGCGGUCCUCCUUCGAGAAGAACCCCAUCGACUUCCUGGAG |
| | | GCCAAGGGCUACAAGGAGGUGAAGAAGGACCUGAUCAUCAAGCUGCCCAAGUACUCCCUGUUCGAGCUGGAGAACGGCCGGAAGCGGAUGC |
| | | UGGCCUCCGCCGGCGAGCUGCAGAAGGGCAACGAGCUGGCCCUGCCCUCCAAGUACGUGAACUUCCUGUACCUGGCCUCCCACUACGAGAA |
| | | GCUGAAGGGCUCCCCCGAGGACAACGAGCAGAAGCAGCUGUUCGUGGAGCAGCACAAGCACUACCUGGACGAGAUCAUCGAGCAGAUCUCC |
| | | GAGUUCUCCAAGCGGGUGAUCCUGGCCGACGCCAACCUGGACAAGGUGCUGUCCGCCUACAACAAGCACCGGGACAAGCCCAUCCGGGAGC |
| | | AGGCCGAGAACAUCAUCCACCUGUUCACCCUGACCAACCUGGGCGCCCCCGCCGCCUUCAAGUACUUCGACACCACCAUCGACAAGAAGCG |
| | | GUACACCUCCACCAAGGAGGUGCUGGACGCCACCCUGAUCCACCAGUCCAUCACCGGCCUGUACGAGACCCGGAUCGACCUGUCCCAGCUG |
| | | GGCGGCGACGGCGCCCCCGAGUCCGCCACCGAGUCCGGCGGCACCUCCACCGAGUCCGAGGGCUCCGCCGGCACCUCCACCGAGUCCGAGG |
| | | GCUCCGCCGGCUCCGCCGGCUCCACCUCCACCGAGGAGGGCACCUCCACCGAGUCCGAGGGCUCCGCCGGCACCUCCACCGAGUCCGAGGG |
| | | CUCCGCCGGCACCUCCGAGUCCGCCACCGGCUCCUCCUCCGGUGCCGCCUUCAAGCCCAACCCCAUCAACUACAUCCUGGGCCUGGACAUC |
| | | GGCAUCGCCUCCGUGGGCUGGGCCAUGGUGGAGAUCGACGAGGAGGAGAACCCCAUCCGGCUGAUCGACCUGGGCGUGCGGGUGUUCGAGC |
| | | GGGCCGAGGUGCCCAAGACCGGCGACUCCCUGGCCAUGGCCCGGCGGCUGGCCCGGUCCGUGCGGCGGCUGACCCGGCGGCGGGCCCACCG |
| | | GCUGCUGCGGGCCCGGCGGCUGCUGAAGCGGGAGGGCGUGCUGCAGGCCGCCGACUUCGACGAGAACGGCCUGAUCAAGUCCCUGCCCAAC |
| | | ACCCCCUGGCAGCUGCGGGCCGCCGCCCUGGACCGGAAGCUGACCCCCCUGGAGUGGUCCGCCGUGCUGCUGCACCUGAUCAAGCACCGGG |
| | | GCUACCUGUCCCAGCGGAAGAACGAGGGCGAGACCGCCGACAAGGAGCUGGGCGCCCUGCUGAAGGGCGUGGCCAACAACGCCCACGCCCU |
| | | GCAGACCGGCGACUUCCGGACCCCCGCCGAGCUGGCCCUGAACAAGUUCGAGAAGGAGUCCGGCCACAUCCGGAACCAGCGGGGCGACUAC |
| | | UCCCACACCUUCUCCCGGAAGGACCUGCAGGCCGAGCUGAUCCUGCUGUUCGAGAAGCAGAAGGAGUUCGGCAACCCCCACGUGUCCGGCG |
| | | GCCUGAAGGAGGGCAUCGAGACCCUGCUGAUGACCCAGCGGCCCGCCCUGUCCGGCGACGCCGUGCAGAAGAUGCUGGGCCACUGCACCUU |
| | | CGAGCCCGCCGAGCCCAAGGCCGCCAAGAACACCUACACCGCCGAGCGGUUCAUCUGGCUGACCAAGCUGAACAACCUGCGGAUCCUGGAG |
| | | CAGGGCUCCGAGCGGCCCCUGACCGACACCGAGCGGGCCACCCUGAUGGACGAGCCCUACCGGAAGUCCAAGCUGACCUACGCCCAGGCCC |
| | | GGAAGCUGCUGGGCCUGGAGGACACCGCCUUCUUCAAGGGCCUGCGGUACGGCAAGGACAACGCCGAGGCCUCCACCCUGAUGGAGAUGAA |
| | | GGCCUACCACGCCAUCUCCCGGGCCCUGGAGAAGGAGGGCCUGAAGGACAAGAAGUCCCCCCUGAACCUGUCCUCCGAGCUGCAGGACGAG |
| | | AUCGGCACCGCCUUCUCCCUGUUCAAGACCGACGAGGACAUCACCGGCCGGCUGAAGGACCGGGUGCAGCCCGAGAUCCUGGAGGCCCUGC |
| | | UGAAGCACAUCUCCUUCGACAAGUUCGUGCAGAUCUCCCUGAAGGCCCUGCGGCGGAUCGUGCCCCUGAUGGAGCAGGGCAAGCGGUACGA |
| | | CGAGGCCUGCGCCGAGAUCUACGGCGACCACUACGGCAAGAAGAACACCGAGGAGAAGAUCUACCUGCCCCCCAUCCCCGCCGACGAGAUC |
| | | CGGAACCCCGUGGUGCUGCGGGCCCUGUCCCAGGCCCGGAAGGUGAUCAACGGCGUGGUGCGGCGGUACGGCUCCCCCGCCCGGAUCCACA |
| | | UCGAGACCGCCCGGGAGGUGGGCAAGUCCUUCAAGGACCGGAAGGAGAUCGAGAAGCGGCAGGAGGAGAACCGGAAGGACCGGGAGAAGGC |
| | | CGCCGCCAAGUUCCGGGAGUACUUCCCCAACUUCGUGGGCGAGCCCAAGUCCAAGGACAUCCUGAAGCUGCGGCUGUACGAGCAGCAGCAC |
| | | GGCAAGUGCCUGUACUCCGGCAAGGAGAUCAACCUGGUGCGGCUGAACGAGAAGGGCUACGUGGAGAUCGACCACGCCCUGCCCUUCUCCC |
| | | GGACCUGGGACGACUCCUUCAACAACAAGGUGCUGGUGCUGGGCUCCGAGAACCAGAACAAGGGCAACCAGACCCCCUACGAGUACUUCAA |
| | | CGGCAAGGACAACUCCCGGGAGUGGCAGGAGUUCAAGGCCCGGGUGGAGACCUCCCGGUUCCCCCGGUCCAAGAAGCAGCGGAUCCUGCUG |
| | | CAGAAGUUCGACGAGGACGGCUUCAAGGAGUGCAACCUGAACGACACCCGGUACGUGAACCGCUUCCUGUGCCAGUUCGUGGCCGACCACA |
| | | UCCUGCUGACCGGCAAGGGCAAGCGGCGGGUGUUCGCCUCCAACGGCCAGAUCACCAACCUGCUGCGGGGCUUCUGGGGCCUGCGGAAGGU |
| | | GCGGGCCGAGAACGACCGGCACCACGCCCUGGACGCCGUGGUGGUGGCCUGCUCCACCGUGGCCAUGCAGCAGAAGAUCACCCGGUUCGUG |
| | | CGGUACAAGGAGAUGAACGCCUUCGACGGCAAGACCAUCGACAAGGAGACCGGCAAGGUGCUGCACCAGAAGACCCACUUCCCCCAGCCCU |
| | | GGGAGUUCUUCGCCCAGGAGGUGAUGAUCCGGGUGUUCGGCAAGCCCGACGGCAAGCCCGAGUUCGAGGAGGCCGACACCCCCGAGAAGCU |
| | | GCGGACCCUGCUGGCCGAGAAGCUGUCCUCCCGGCCCGAGGCCGUGCACGAGUACGUGACCCCCCUGUUCGUGUCCCGGGCCCCCAACCGG |
| | | AAGAUGUCCGGCGCCCACAAGGACACCCUGCGGUCCGCCAAGCGGUUCGUGAAGCACAACGAGAAGAUCUCCGUGAAGCGGGUGUGGCUGA |
| | | CCGAGAUCAAGCUGGCCGACCUGGAGAACAUGGUGAACUACAAGAACGGCCGGGAGAUCGAGCUGUACGAGGCCCUGAAGGCCCGGCUGGA |
| | | GGCCUACGGCGGCAACGCCAAGCAGGCCUUCGACCCCAAGGACAACCCCUUCUACAAGAAGGGCGGCCAGCUGGUGAAGGCCGUGCGGGUG |
| | | GAGAAGACCCAGGAGUCCGGCGUGCUGCUGAACAAGAAGAACGCCUACACCAUCGCCGACAACGGCGACAUGGUGCGGGUGGACGUGUUCU |
| | | GCAAGGUGGACAAGAAGGGCAAGAACCAGUACUUCAUCGUGCCCAUCUACGCCUGGCAGGUGGCCGAGAACAUCCUGCCCGACAUCGACUG |
| | | CAAGGGCUACCGGAUCGACGACUCCUACACCUUCUGCUUCUCCCUGCACAAGUACGACCUGAUCGCCUUCCAGAAGGACGAGAAGUCCAAG |
| | | GUGGAGUUCGCCUACUACAUCAACUGCGACUCCUCCAACGGCCGGUUCUACCUGGCCUGGCACGACAAGGGCUCCAAGGAGCAGCAGUUCC |
| | | GGAUCUCCACCCAGAACCUGGUGCUGAUCCAGAAGUACCAGGUGAACGAGCUGGGCAAGGAGAUCCGGCCCUGCCGGCUGAAGAAGCGGCC |
| | | CCCCGUGCGGUCCGGAAAGCGGACCGCCGACGGCUCCGGAGGAGGAAGCCCGAAGAAGAAGAGAAAGGUCUAG |
| 52 | Cas9- | MDKKYSIGLDIGTNSVGWAVITDEYKVPSKKFKVLGNTDRHSIKKNLIGALLFDSGETAEATRLKRTARRRYTRRKNRICYLQEIFSNEMA |
| | Cas9- | KVDDSFFHRLEESFLVEEDKKHERHPIFGNIVDEVAYHEKYPTIYHLRKKLVDSTDKADLRLIYLALAHMIKFRGHFLIEGDLNPDNSDVD |
| | fusion | KLFIQLVQTYNQLFEENPINASGVDAKAILSARLSKSRRLENLIAQLPGEKKNGLFGNLIALSLGLTPNFKSNFDLAEDAKLQLSKDTYDD |
| | 71 | DLDNLLAQIGDQYADLFLAAKNLSDAILLSDILRVNTEITKAPLSASMIKRYDEHHQDLTLLKALVRQQLPEKYKEIFFDQSKNGYAGYID |
| | amino | GGASQEEFYKFIKPILEKMDGTEELLVKLNREDLLRKQRTFDNGSIPHQIHLGELHAILRRQEDFYPFLKDNREKIEKILTFRIPYYVGPL |
| | acid | ARGNSRFAWMTRKSEETITPWNFEEVVDKGASAQSFIERMTNFDKNLPNEKVLPKHSLLYEYFTVYNELTKVKYVTEGMRKPAFLSGEQKK |
| | residual | AIVDLLFKTNRKVTVKQLKEDYFKKIECFDSVEISGVEDRFNASLGTYHDLLKIIKDKDFLDNEENEDILEDIVLTLTLFEDREMIEERLK |
| | linker | TYAHLFDDKVMKQLKRRRYTGWGRLSRKLINGIRDKQSGKTILDFLKSDGFANRNFMQLIHDDSLTFKEDIQKAQVSGQGDSLHEHIANLA |
| | (mRNA | GSPAIKKGILQTVKVVDELVKVMGRHKPENIVIEMARENQTTQKGQKNSRERMKRIEEGIKELGSQILKEHPVENTQLQNEKLYLYYLQNG |
| | O)- | RDMYVDQELDINRLSDYDVDHIVPQSFLKDDSIDNKVLTRSDKNRGKSDNVPSEEVVKKMKNYWRQLLNAKLITQRKFDNLTKAERGGLSE |
| | mRNA | LDKAGFIKRQLVETRQITKHVAQILDSRMNTKYDENDKLIREVKVITLKSKLVSDFRKDFQFYKVREINNYHHAHDAYLNAVVGTALIKKY |
| | sequence | PKLESEFVYGDYKVYDVRKMIAKSEQEIGKATAKYFFYSNIMNFFKTEITLANGEIRKRPLIETNGETGEIVWDKGRDFATVRKVLSMPQV |
| | | NIVKKTEVQTGGFSKESILPKRNSDKLIARKKDWDPKKYGGFDSPTVAYSVLVVAKVEKGKSKKLKSVKELLGITIMERSSFEKNPIDFLE |
| | | AKGYKEVKKDLIIKLPKYSLFELENGRKRMLASAGELQKGNELALPSKYVNFLYLASHYEKLKGSPEDNEQKQLFVEQHKHYLDEIIEQIS |
| | | EFSKRVILADANLDKVLSAYNKHRDKPIREQAENIIHLFTLTNLGAPAAFKYFDTTIDKKRYTSTKEVLDATLIHQSITGLYETRIDLSQL |
| | | GGDGAPESATESGGTSTESEGSAGTSTESEGSAGSAGSTSTEEGTSTESEGSAGTSTESEGSAGTSESATGSSSGAAFKPNPINYILGLDI |
| | | GIASVGWAMVEIDEEENPIRLIDLGVRVFERAEVPKTGDSLAMARRLARSVRRLTRRRAHRLLRARRLLKREGVLQAADFDENGLIKSLPN |
| | | TPWQLRAAALDRKLTPLEWSAVLLHLIKHRGYLSQRKNEGETADKELGALLKGVANNAHALQTGDFRTPAELALNKFEKESGHIRNQRGDY |
| | | SHTFSRKDLQAELILLFEKQKEFGNPHVSGGLKEGIETLLMTQRPALSGDAVQKMLGHCTFEPAEPKAAKNTYTAERFIWLTKLNNLRILE |
| | | QGSERPLTDTERATLMDEPYRKSKLTYAQARKLLGLEDTAFFKGLRYGKDNAEASTLMEMKAYHAISRALEKEGLKDKKSPLNLSSELQDE |
| | | IGTAFSLFKTDEDITGRLKDRVQPEILEALLKHISFDKFVQISLKALRRIVPLMEQGKRYDEACAEIYGDHYGKKNTEEKIYLPPIPADEI |
| | | RNPVVLRALSQARKVINGVVRRYGSPARIHIETAREVGKSFKDRKEIEKRQEENRKDREKAAAKFREYFPNFVGEPKSKDILKLRLYEQQH |
| | | GKCLYSGKEINLVRLNEKGYVEIDHALPFSRTWDDSFNNKVLVLGSENQNKGNQTPYEYFNGKDNSREWQEFKARVETSRFPRSKKQRILL |
| | | QKFDEDGFKECNLNDTRYVNRFLCQFVADHILLTGKGKRRVFASNGQITNLLRGFWGLRKVRAENDRHHALDAVVVACSTVAMQQKITRFV |
| | | RYKEMNAFDGKTIDKETGKVLHQKTHFPQPWEFFAQEVMIRVFGKPDGKPEFEEADTPEKLRTLLAEKLSSRPEAVHEYVTPLFVSRAPNR |
| | | KMSGAHKDTLRSAKRFVKHNEKISVKRVWLTEIKLADLENMVNYKNGREIELYEALKARLEAYGGNAKQAFDPKDNPFYKKGGQLVKAVRV |
| | | EKTQESGVLLNKKNAYTIADNGDMVRVDVFCKVDKKGKNQYFIVPIYAWQVAENILPDIDCKGYRIDDSYTFCFSLHKYDLIAFQKDEKSK |
| | | VEFAYYINCDSSNGRFYLAWHDKGSKEQQFRISTQNLVLIQKYQVNELGKEIRPCRLKKRPPVRSGKRTADGSGGGSPKKKRKV* |
| 53 | Cas9- | GGGAAGCUCAGAAUAAACGCUCAACUUUGGCCGGAUCUGCCACCAUGGACAAGAAGUACUCCAUCGGCCUGGACAUCGGCACCAACUCCGU |
| | Cas9 | GGGCUGGGCCGUGAUCACCGACGAGUACAAGGUGCCCUCCAAGAAGUUCAAGGUGCUGGGCAACACCGACCGGCACUCCAUCAAGAAGAAC |
| | fusion- | CUGAUCGGCGCCCUGCUGUUCGACUCCGGCGAGACCGCCGAGGCCACCCGGCUGAAGCGGACCGCCCGGCGGCGGUACACCCGGCGGAAGA |
| | 61 | ACCGGAUCUGCUACCUGCAGGAGAUCUUCUCCAACGAGAUGGCCAAGGUGGACGACUCCUUCUUCCACCGGCUGGAGGAGUCCUUCCUGGU |
| | amino | GGAGGAGGACAAGAAGCACGAGCGGCACCCCAUCUUCGGCAACAUCGUGGACGAGGUGGCCUACCACGAGAAGUACCCCACCAUCUACCAC |
| | acid | CUGCGGAAGAAGCUGGUGGACUCCACCGACAAGGCCGACCUGCGGCUGAUCUACCUGGCCCUGGCCCACAUGAUCAAGUUCCGGGGCCACU |
| | residue | UCCUGAUCGAGGGCGACCUGAACCCCGACAACUCCGACGUGGACAAGCUGUUCAUCCAGCUGGUGCAGACCUACAACCAGCUGUUCGAGGA |
| | linker | GAACCCCAUCAACGCCUCCGGCGUGGACGCCAAGGCCAUCCUGUCCGCCCGGCUGUCCAAGUCCCGGCGGCUGGAGAACCUGAUCGCCCAG |
| | and | CUGCCCGGCGAGAAGAAGAACGGCCUGUUCGGCAACCUGAUCGCCCUGUCCCUGGGCCUGACCCCCAACUUCAAGUCCAACUUCGACCUGG |
| | HiBit | CCGAGGACGCCAAGCUGCAGCUGUCCAAGGACACCUACGACGACGACCUGGACAACCUGCUGGCCCAGAUCGGCGACCAGUACGCCGACCU |
| | tag | GUUCCUGGCCGCCAAGAACCUGUCCGACGCCAUCCUGCUGUCCGACAUCCUGCGGGUGAACACCGAGAUCACCAAGGCCCCCCUGUCCGCC |
| | (mRNA | UCCAUGAUCAAGCGGUACGACGAGCACCACCAGGACCUGACCCUGCUGAAGGCCCUGGUGCGGCAGCAGCUGCCCGAGAAGUACAAGGAGA |
| | P)- | UCUUCUUCGACCAGUCCAAGAACGGCUACGCCGGCUACAUCGACGGCGGCGCCUCCCAGGAGGAGUUCUACAAGUUCAUCAAGCCCAUCCU |
| | mRNA | GGAGAAGAUGGACGGCACCGAGGAGCUGCUGGUGAAGCUGAACCGGGAGGACCUGCUGCGGAAGCAGCGGACCUUCGACAACGGCUCCAUC |
| | sequence | CCCCACCAGAUCCACCUGGGCGAGCUGCACGCCAUCCUGCGGCGGCAGGAGGACUUCUACCCCUUCCUGAAGGACAACCGGGAGAAGAUCG |
| | | AGAAGAUCCUGACCUUCCGGAUCCCCUACUACGUGGGCCCCCUGGCCCGGGGCAACUCCCGGUUCGCCUGGAUGACCCGGAAGUCCGAGGA |
| | | GACCAUCACCCCCUGGAACUUCGAGGAGGUGGUGGACAAGGGCGCCUCCGCCCAGUCCUUCAUCGAGCGGAUGACCAACUUCGACAAGAAC |
| | | CUGCCCAACGAGAAGGUGCUGCCCAAGCACUCCCUGCUGUACGAGUACUUCACCGUGUACAACGAGCUGACCAAGGUGAAGUACGUGACCG |
| | | AGGGCAUGCGGAAGCCCGCCUUCCUGUCCGGCGAGCAGAAGAAGGCCAUCGUGGACCUGCUGUUCAAGACCAACCGGAAGGUGACCGUGAA |
| | | GCAGCUGAAGGAGGACUACUUCAAGAAGAUCGAGUGCUUCGACUCCGUGGAGAUCUCCGGCGUGGAGGACCGGUUCAACGCCUCCCUGGGC |
| | | ACCUACCACGACCUGCUGAAGAUCAUCAAGGACAAGGACUUCCUGGACAACGAGGAGAACGAGGACAUCCUGGAGGACAUCGUGCUGACCC |
| | | UGACCCUGUUCGAGGACCGGGAGAUGAUCGAGGAGCGGCUGAAGACCUACGCCCACCUGUUCGACGACAAGGUGAUGAAGCAGCUGAAGCG |
| | | GCGGCGGUACACCGGCUGGGGCCGGCUGUCCCGGAAGCUGAUCAACGGCAUCCGGGACAAGCAGUCCGGCAAGACCAUCCUGGACUUCCUG |
| | | AAGUCCGACGGCUUCGCCAACCGGAACUUCAUGCAGCUGAUCCACGACGACUCCCUGACCUUCAAGGAGGACAUCCAGAAGGCCCAGGUGU |
| | | CCGGCCAGGGCGACUCCCUGCACGAGCACAUCGCCAACCUGGCCGGCUCCCCCGCCAUCAAGAAGGGCAUCCUGCAGACCGUGAAGGUGGU |
| | | GGACGAGCUGGUGAAGGUGAUGGGCCGGCACAAGCCCGAGAACAUCGUGAUCGAGAUGGCCCGGGAGAACCAGACCACCCAGAAGGGCCAG |
| | | AAGAACUCCCGGGAGCGGAUGAAGCGGAUCGAGGAGGGCAUCAAGGAGCUGGGCUCCCAGAUCCUGAAGGAGCACCCCGUGGAGAACACCC |
| | | AGCUGCAGAACGAGAAGCUGUACCUGUACUACCUGCAGAACGGCCGGGACAUGUACGUGGACCAGGAGCUGGACAUCAACCGGCUGUCCGA |
| | | CUACGACGUGGACCACAUCGUGCCCCAGUCCUUCCUGAAGGACGACUCCAUCGACAACAAGGUGCUGACCCGGUCCGACAAGAACCGGGGC |
| | | AAGUCCGACAACGUGCCCUCCGAGGAGGUGGUGAAGAAGAUGAAGAACUACUGGCGGCAGCUGCUGAACGCCAAGCUGAUCACCCAGCGGA |
| | | AGUUCGACAACCUGACCAAGGCCGAGCGGGGCGGCCUGUCCGAGCUGGACAAGGCCGGCUUCAUCAAGCGGCAGCUGGUGGAGACCCGGCA |
| | | GAUCACCAAGCACGUGGCCCAGAUCCUGGACUCCCGGAUGAACACCAAGUACGACGAGAACGACAAGCUGAUCCGGGAGGUGAAGGUGAUC |
| | | ACCCUGAAGUCCAAGCUGGUGUCCGACUUCCGGAAGGACUUCCAGUUCUACAAGGUGCGGGAGAUCAACAACUACCACCACGCCCACGACG |
| | | CCUACCUGAACGCCGUGGUGGGCACCGCCCUGAUCAAGAAGUACCCCAAGCUGGAGUCCGAGUUCGUGUACGGCGACUACAAGGUGUACGA |
| | | CGUGCGGAAGAUGAUCGCCAAGUCCGAGCAGGAGAUCGGCAAGGCCACCGCCAAGUACUUCUUCUACUCCAACAUCAUGAACUUCUUCAAG |
| | | ACCGAGAUCACCCUGGCCAACGGCGAGAUCCGGAAGCGGCCCCUGAUCGAGACCAACGGCGAGACCGGCGAGAUCGUGUGGGACAAGGGCC |
| | | GGGACUUCGCCACCGUGCGGAAGGUGCUGUCCAUGCCCCAGGUGAACAUCGUGAAGAAGACCGAGGUGCAGACCGGCGGCUUCUCCAAGGA |
| | | GUCCAUCCUGCCCAAGCGGAACUCCGACAAGCUGAUCGCCCGGAAGAAGGACUGGGACCCCAAGAAGUACGGCGGCUUCGACUCCCCCACC |
| | | GUGGCCUACUCCGUGCUGGUGGUGGCCAAGGUGGAGAAGGGCAAGUCCAAGAAGCUGAAGUCCGUGAAGGAGCUGCUGGGCAUCACCAUCA |
| | | UGGAGCGGUCCUCCUUCGAGAAGAACCCCAUCGACUUCCUGGAGGCCAAGGGCUACAAGGAGGUGAAGAAGGACCUGAUCAUCAAGCUGCC |
| | | CAAGUACUCCCUGUUCGAGCUGGAGAACGGCCGGAAGCGGAUGCUGGCCUCCGCCGGCGAGCUGCAGAAGGGCAACGAGCUGGCCCUGCCC |
| | | UCCAAGUACGUGAACUUCCUGUACCUGGCCUCCCACUACGAGAAGCUGAAGGGCUCCCCCGAGGACAACGAGCAGAAGCAGCUGUUCGUGG |
| | | AGCAGCACAAGCACUACCUGGACGAGAUCAUCGAGCAGAUCUCCGAGUUCUCCAAGCGGGUGAUCCUGGCCGACGCCAACCUGGACAAGGU |
| | | GCUGUCCGCCUACAACAAGCACCGGGACAAGCCCAUCCGGGAGCAGGCCGAGAACAUCAUCCACCUGUUCACCCUGACCAACCUGGGCGCC |
| | | CCCGCCGCCUUCAAGUACUUCGACACCACCAUCGACAAGAAGCGGUACACCUCCACCAAGGAGGUGCUGGACGCCACCCUGAUCCACCAGU |
| | | CCAUCACCGGCCUGUACGAGACCCGGAUCGACCUGUCCCAGCUGGGGGGCGACGGCGCCCCCGAGUCCGCCACCGAGUCCGGCGGCACCUC |
| | | CACCGAGUCCGAGGGCUCCGCCGGCACCUCCACCGAGUCCGAGGGCUCCGCCGGCUCCGCCGGCUCCACCUCCACCGAGGAGGGCACCUCC |
| | | ACCGAGUCCGAGGGCUCCGCCGGCACCUCCACCGAGUCCGAGGGCUCCUCCUCCGGUGCCGCCUUCAAGCCCAACCCCAUCAACUACAUCC |
| | | UGGGCCUGGACAUCGGCAUCGCCUCCGUGGGCUGGGCCAUGGUGGAGAUCGACGAGGAGGAGAACCCCAUCCGGCUGAUCGACCUGGGCGU |
| | | GCGGGUGUUCGAGCGGGCCGAGGUGCCCAAGACCGGCGACUCCCUGGCCAUGGCCCGGCGGCUGGCCCGGUCCGUGCGGCGGCUGACCCGG |
| | | CGGCGGGCCCACCGGCUGCUGCGGGCCCGGCGGCUGCUGAAGCGGGAGGGCGUGCUGCAGGCCGCCGACUUCGACGAGAACGGCCUGAUCA |
| | | AGUCCCUGCCCAACACCCCCUGGCAGCUGCGGGCCGCCGCCCUGGACCGGAAGCUGACCCCCCUGGAGUGGUCCGCCGUGCUGCUGCACCU |
| | | GAUCAAGCACCGGGGCUACCUGUCCCAGCGGAAGAACGAGGGCGAGACCGCCGACAAGGAGCUGGGCGCCCUGCUGAAGGGCGUGGCCAAC |
| | | AACGCCCACGCCCUGCAGACCGGCGACUUCCGGACCCCCGCCGAGCUGGCCCUGAACAAGUUCGAGAAGGAGUCCGGCCACAUCCGGAACC |
| | | AGCGGGGCGACUACUCCCACACCUUCUCCCGGAAGGACCUGCAGGCCGAGCUGAUCCUGCUGUUCGAGAAGCAGAAGGAGUUCGGCAACCC |
| | | CCACGUGUCCGGCGGCCUGAAGGAGGGCAUCGAGACCCUGCUGAUGACCCAGCGGCCCGCCCUGUCCGGCGACGCCGUGCAGAAGAUGCUG |
| | | GGCCACUGCACCUUCGAGCCCGCCGAGCCCAAGGCCGCCAAGAACACCUACACCGCCGAGCGGUUCAUCUGGCUGACCAAGCUGAACAACC |
| | | UGCGGAUCCUGGAGCAGGGCUCCGAGCGGCCCCUGACCGACACCGAGCGGGCCACCCUGAUGGACGAGCCCUACCGGAAGUCCAAGCUGAC |
| | | CUACGCCCAGGCCCGGAAGCUGCUGGGCCUGGAGGACACCGCCUUCUUCAAGGGCCUGCGGUACGGCAAGGACAACGCCGAGGCCUCCACC |
| | | CUGAUGGAGAUGAAGGCCUACCACGCCAUCUCCCGGGCCCUGGAGAAGGAGGGCCUGAAGGACAAGAAGUCCCCCCUGAACCUGUCCUCCG |
| | | AGCUGCAGGACGAGAUCGGCACCGCCUUCUCCCUGUUCAAGACCGACGAGGACAUCACCGGCCGGCUGAAGGACCGGGUGCAGCCCGAGAU |
| | | CCUGGAGGCCCUGCUGAAGCACAUCUCCUUCGACAAGUUCGUGCAGAUCUCCCUGAAGGCCCUGCGGCGGAUCGUGCCCCUGAUGGAGCAG |
| | | GGCAAGCGGUACGACGAGGCCUGCGCCGAGAUCUACGGCGACCACUACGGCAAGAAGAACACCGAGGAGAAGAUCUACCUGCCCCCCAUCC |
| | | CCGCCGACGAGAUCCGGAACCCCGUGGUGCUGCGGGCCCUGUCCCAGGCCCGGAAGGUGAUCAACGGCGUGGUGCGGCGGUACGGCUCCCC |
| | | CGCCCGGAUCCACAUCGAGACCGCCCGGGAGGUGGGCAAGUCCUUCAAGGACCGGAAGGAGAUCGAGAAGCGGCAGGAGGAGAACCGGAAG |
| | | GACCGGGAGAAGGCCGCCGCCAAGUUCCGGGAGUACUUCCCCAACUUCGUGGGCGAGCCCAAGUCCAAGGACAUCCUGAAGCUGCGGCUGU |
| | | ACGAGCAGCAGCACGGCAAGUGCCUGUACUCCGGCAAGGAGAUCAACCUGGUGCGGCUGAACGAGAAGGGCUACGUGGAGAUCGACCACGC |
| | | CCUGCCCUUCUCCCGGACCUGGGACGACUCCUUCAACAACAAGGUGCUGGUGCUGGGCUCCGAGAACCAGAACAAGGGCAACCAGACCCCC |
| | | UACGAGUACUUCAACGGCAAGGACAACUCCCGGGAGUGGCAGGAGUUCAAGGCCCGGGUGGAGACCUCCCGGUUCCCCCGGUCCAAGAAGC |
| | | AGCGGAUCCUGCUGCAGAAGUUCGACGAGGACGGCUUCAAGGAGUGCAACCUGAACGACACCCGGUACGUGAACCGCUUCCUGUGCCAGUU |
| | | CGUGGCCGACCACAUCCUGCUGACCGGCAAGGGCAAGCGGCGGGUGUUCGCCUCCAACGGCCAGAUCACCAACCUGCUGCGGGGCUUCUGG |
| | | GGCCUGCGGAAGGUGCGGGCCGAGAACGACCGGCACCACGCCCUGGACGCCGUGGUGGUGGCCUGCUCCACCGUGGCCAUGCAGCAGAAGA |
| | | UCACCCGGUUCGUGCGGUACAAGGAGAUGAACGCCUUCGACGGCAAGACCAUCGACAAGGAGACCGGCAAGGUGCUGCACCAGAAGACCCA |
| | | CUUCCCCCAGCCCUGGGAGUUCUUCGCCCAGGAGGUGAUGAUCCGGGUGUUCGGCAAGCCCGACGGCAAGCCCGAGUUCGAGGAGGCCGAC |
| | | ACCCCCGAGAAGCUGCGGACCCUGCUGGCCGAGAAGCUGUCCUCCCGGCCCGAGGCCGUGCACGAGUACGUGACCCCCCUGUUCGUGUCCC |
| | | GGGCCCCCAACCGGAAGAUGUCCGGCGCCCACAAGGACACCCUGCGGUCCGCCAAGCGGUUCGUGAAGCACAACGAGAAGAUCUCCGUGAA |
| | | GCGGGUGUGGCUGACCGAGAUCAAGCUGGCCGACCUGGAGAACAUGGUGAACUACAAGAACGGCCGGGAGAUCGAGCUGUACGAGGCCCUG |
| | | AAGGCCCGGCUGGAGGCCUACGGCGGCAACGCCAAGCAGGCCUUCGACCCCAAGGACAACCCCUUCUACAAGAAGGGCGGCCAGCUGGUGA |
| | | AGGCCGUGCGGGUGGAGAAGACCCAGGAGUCCGGCGUGCUGCUGAACAAGAAGAACGCCUACACCAUCGCCGACAACGGCGACAUGGUGCG |
| | | GGUGGACGUGUUCUGCAAGGUGGACAAGAAGGGCAAGAACCAGUACUUCAUCGUGCCCAUCUACGCCUGGCAGGUGGCCGAGAACAUCCUG |
| | | CCCGACAUCGACUGCAAGGGCUACCGGAUCGACGACUCCUACACCUUCUGCUUCUCCCUGCACAAGUACGACCUGAUCGCCUUCCAGAAGG |
| | | ACGAGAAGUCCAAGGUGGAGUUCGCCUACUACAUCAACUGCGACUCCUCCAACGGCCGGUUCUACCUGGCCUGGCACGACAAGGGCUCCAA |
| | | GGAGCAGCAGUUCCGGAUCUCCACCCAGAACCUGGUGCUGAUCCAGAAGUACCAGGUGAACGAGCUGGGCAAGGAGAUCCGGCCCUGCCGG |
| | | CUGAAGAAGCGGCCCCCCGUGCGGUCCGGAAAGCGGACCGCCGACGGCUCCGGAGGAGGAAGCCCGAAGAAGAAGAGAAAGGUCAGCGAAA |
| | | GCGCAACACCGGAAAGCGUCAGCGGAUGGAGACUGUUCAAGAAGAUCAGCUAGCUAGCACCAGCCUCAAGAACACCCGAAUGGAGUCUCUA |
| | | AGCUACAUAAUACCAACUUACACUUUACAAAAUGUUGUCCCCCAAAAUGUAGCCAUUCGUAUCUGCUCCUAAUAAAAAGAAAGUUUCUUCA |
| | | CAUUCUCUCGAGAAAAAAAAAAAAUGGAAAAAAAAAAAACGGAAAAAAAAAAAAGGUAAAAAAAAAAAAUAUAAAAAAAAAAAACAUAAAA |
| | | AAAAAAAACGAAAAAAAAAAAACGUAAAAAAAAAAAACUCAAAAAAAAAAAAGAUAAAAAAAAAAAACCUAAAAAAAAAAAAUGUAAAAAA |
| | | AAAAAAGGGAAAAAAAAAAAACGCAAAAAAAAAAAACACAAAAAAAAAAAAUGCAAAAAAAAAAAAUCGAAAAAAAAAAAAUCUAAAAAAA |
| | | AAAAACGAAAAAAAAAAAACCCAAAAAAAAAAAAGACAAAAAAAAAAAAUAGAAAAAAAAAAAAGUUAAAAAAAAAAAACUGAAAAAAAAA |
| | | AAAUUUAAAAAAAAAAAAUCUAG |
| 54 | Cas9- | AUGGACAAGAAGUACUCCAUCGGCCUGGACAUCGGCACCAACUCCGUGGGCUGGGCCGUGAUCACCGACGAGUACAAGGUGCCCUCCAAGA |
| | Cas9 | AGUUCAAGGUGCUGGGCAACACCGACCGGCACUCCAUCAAGAAGAACCUGAUCGGCGCCCUGCUGUUCGACUCCGGCGAGACCGCCGAGGC |
| | fusion- | CACCCGGCUGAAGCGGACCGCCCGGCGGCGGUACACCCGGCGGAAGAACCGGAUCUGCUACCUGCAGGAGAUCUUCUCCAACGAGAUGGCC |
| | 61 | AAGGUGGACGACUCCUUCUUCCACCGGCUGGAGGAGUCCUUCCUGGUGGAGGAGGACAAGAAGCACGAGCGGCACCCCAUCUUCGGCAACA |
| | amino | UCGUGGACGAGGUGGCCUACCACGAGAAGUACCCCACCAUCUACCACCUGCGGAAGAAGCUGGUGGACUCCACCGACAAGGCCGACCUGCG |
| | acid | GCUGAUCUACCUGGCCCUGGCCCACAUGAUCAAGUUCCGGGGCCACUUCCUGAUCGAGGGCGACCUGAACCCCGACAACUCCGACGUGGAC |
| | residue | AAGCUGUUCAUCCAGCUGGUGCAGACCUACAACCAGCUGUUCGAGGAGAACCCCAUCAACGCCUCCGGCGUGGACGCCAAGGCCAUCCUGU |
| | linker | CCGCCCGGCUGUCCAAGUCCCGGCGGCUGGAGAACCUGAUCGCCCAGCUGCCCGGCGAGAAGAAGAACGGCCUGUUCGGCAACCUGAUCGC |
| | and | CCUGUCCCUGGGCCUGACCCCCAACUUCAAGUCCAACUUCGACCUGGCCGAGGACGCCAAGCUGCAGCUGUCCAAGGACACCUACGACGAC |
| | HiBit | GACCUGGACAACCUGCUGGCCCAGAUCGGCGACCAGUACGCCGACCUGUUCCUGGCCGCCAAGAACCUGUCCGACGCCAUCCUGCUGUCCG |
| | tag | ACAUCCUGCGGGUGAACACCGAGAUCACCAAGGCCCCCCUGUCCGCCUCCAUGAUCAAGCGGUACGACGAGCACCACCAGGACCUGACCCU |
| | (mRNA | GCUGAAGGCCCUGGUGCGGCAGCAGCUGCCCGAGAAGUACAAGGAGAUCUUCUUCGACCAGUCCAAGAACGGCUACGCCGGCUACAUCGAC |
| | P)-ORF | GGCGGCGCCUCCCAGGAGGAGUUCUACAAGUUCAUCAAGCCCAUCCUGGAGAAGAUGGACGGCACCGAGGAGCUGCUGGUGAAGCUGAACC |
| | sequence | GGGAGGACCUGCUGCGGAAGCAGCGGACCUUCGACAACGGCUCCAUCCCCCACCAGAUCCACCUGGGCGAGCUGCACGCCAUCCUGCGGCG |
| | | GCAGGAGGACUUCUACCCCUUCCUGAAGGACAACCGGGAGAAGAUCGAGAAGAUCCUGACCUUCCGGAUCCCCUACUACGUGGGCCCCCUG |
| | | GCCCGGGGCAACUCCCGGUUCGCCUGGAUGACCCGGAAGUCCGAGGAGACCAUCACCCCCUGGAACUUCGAGGAGGUGGUGGACAAGGGCG |
| | | CCUCCGCCCAGUCCUUCAUCGAGCGGAUGACCAACUUCGACAAGAACCUGCCCAACGAGAAGGUGCUGCCCAAGCACUCCCUGCUGUACGA |
| | | GUACUUCACCGUGUACAACGAGCUGACCAAGGUGAAGUACGUGACCGAGGGCAUGCGGAAGCCCGCCUUCCUGUCCGGCGAGCAGAAGAAG |
| | | GCCAUCGUGGACCUGCUGUUCAAGACCAACCGGAAGGUGACCGUGAAGCAGCUGAAGGAGGACUACUUCAAGAAGAUCGAGUGCUUCGACU |
| | | CCGUGGAGAUCUCCGGCGUGGAGGACCGGUUCAACGCCUCCCUGGGCACCUACCACGACCUGCUGAAGAUCAUCAAGGACAAGGACUUCCU |
| | | GGACAACGAGGAGAACGAGGACAUCCUGGAGGACAUCGUGCUGACCCUGACCCUGUUCGAGGACCGGGAGAUGAUCGAGGAGCGGCUGAAG |
| | | ACCUACGCCCACCUGUUCGACGACAAGGUGAUGAAGCAGCUGAAGCGGCGGCGGUACACCGGCUGGGGCCGGCUGUCCCGGAAGCUGAUCA |
| | | ACGGCAUCCGGGACAAGCAGUCCGGCAAGACCAUCCUGGACUUCCUGAAGUCCGACGGCUUCGCCAACCGGAACUUCAUGCAGCUGAUCCA |
| | | CGACGACUCCCUGACCUUCAAGGAGGACAUCCAGAAGGCCCAGGUGUCCGGCCAGGGCGACUCCCUGCACGAGCACAUCGCCAACCUGGCC |
| | | GGCUCCCCCGCCAUCAAGAAGGGCAUCCUGCAGACCGUGAAGGUGGUGGACGAGCUGGUGAAGGUGAUGGGCCGGCACAAGCCCGAGAACA |
| | | UCGUGAUCGAGAUGGCCCGGGAGAACCAGACCACCCAGAAGGGCCAGAAGAACUCCCGGGAGCGGAUGAAGCGGAUCGAGGAGGGCAUCAA |
| | | GGAGCUGGGCUCCCAGAUCCUGAAGGAGCACCCCGUGGAGAACACCCAGCUGCAGAACGAGAAGCUGUACCUGUACUACCUGCAGAACGGC |
| | | CGGGACAUGUACGUGGACCAGGAGCUGGACAUCAACCGGCUGUCCGACUACGACGUGGACCACAUCGUGCCCCAGUCCUUCCUGAAGGACG |
| | | ACUCCAUCGACAACAAGGUGCUGACCCGGUCCGACAAGAACCGGGGCAAGUCCGACAACGUGCCCUCCGAGGAGGUGGUGAAGAAGAUGAA |
| | | GAACUACUGGCGGCAGCUGCUGAACGCCAAGCUGAUCACCCAGCGGAAGUUCGACAACCUGACCAAGGCCGAGCGGGGCGGCCUGUCCGAG |
| | | CUGGACAAGGCCGGCUUCAUCAAGCGGCAGCUGGUGGAGACCCGGCAGAUCACCAAGCACGUGGCCCAGAUCCUGGACUCCCGGAUGAACA |
| | | CCAAGUACGACGAGAACGACAAGCUGAUCCGGGAGGUGAAGGUGAUCACCCUGAAGUCCAAGCUGGUGUCCGACUUCCGGAAGGACUUCCA |
| | | GUUCUACAAGGUGCGGGAGAUCAACAACUACCACCACGCCCACGACGCCUACCUGAACGCCGUGGUGGGCACCGCCCUGAUCAAGAAGUAC |
| | | CCCAAGCUGGAGUCCGAGUUCGUGUACGGCGACUACAAGGUGUACGACGUGCGGAAGAUGAUCGCCAAGUCCGAGCAGGAGAUCGGCAAGG |
| | | CCACCGCCAAGUACUUCUUCUACUCCAACAUCAUGAACUUCUUCAAGACCGAGAUCACCCUGGCCAACGGCGAGAUCCGGAAGCGGCCCCU |
| | | GAUCGAGACCAACGGCGAGACCGGCGAGAUCGUGUGGGACAAGGGCCGGGACUUCGCCACCGUGCGGAAGGUGCUGUCCAUGCCCCAGGUG |
| | | AACAUCGUGAAGAAGACCGAGGUGCAGACCGGCGGCUUCUCCAAGGAGUCCAUCCUGCCCAAGCGGAACUCCGACAAGCUGAUCGCCCGGA |
| | | AGAAGGACUGGGACCCCAAGAAGUACGGCGGCUUCGACUCCCCCACCGUGGCCUACUCCGUGCUGGUGGUGGCCAAGGUGGAGAAGGGCAA |
| | | GUCCAAGAAGCUGAAGUCCGUGAAGGAGCUGCUGGGCAUCACCAUCAUGGAGCGGUCCUCCUUCGAGAAGAACCCCAUCGACUUCCUGGAG |
| | | GCCAAGGGCUACAAGGAGGUGAAGAAGGACCUGAUCAUCAAGCUGCCCAAGUACUCCCUGUUCGAGCUGGAGAACGGCCGGAAGCGGAUGC |
| | | UGGCCUCCGCCGGCGAGCUGCAGAAGGGCAACGAGCUGGCCCUGCCCUCCAAGUACGUGAACUUCCUGUACCUGGCCUCCCACUACGAGAA |
| | | GCUGAAGGGCUCCCCCGAGGACAACGAGCAGAAGCAGCUGUUCGUGGAGCAGCACAAGCACUACCUGGACGAGAUCAUCGAGCAGAUCUCC |
| | | GAGUUCUCCAAGCGGGUGAUCCUGGCCGACGCCAACCUGGACAAGGUGCUGUCCGCCUACAACAAGCACCGGGACAAGCCCAUCCGGGAGC |
| | | AGGCCGAGAACAUCAUCCACCUGUUCACCCUGACCAACCUGGGCGCCCCCGCCGCCUUCAAGUACUUCGACACCACCAUCGACAAGAAGCG |
| | | GUACACCUCCACCAAGGAGGUGCUGGACGCCACCCUGAUCCACCAGUCCAUCACCGGCCUGUACGAGACCCGGAUCGACCUGUCCCAGCUG |
| | | GGCGGCGACGGCGCCCCCGAGUCCGCCACCGAGUCCGGCGGCACCUCCACCGAGUCCGAGGGCUCCGCCGGCACCUCCACCGAGUCCGAGG |
| | | GCUCCGCCGGCUCCGCCGGCUCCACCUCCACCGAGGAGGGCACCUCCACCGAGUCCGAGGGCUCCGCCGGCACCUCCACCGAGUCCGAGGG |
| | | CUCCUCCUCCGGUGCCGCCUUCAAGCCCAACCCCAUCAACUACAUCCUGGGCCUGGACAUCGGCAUCGCCUCCGUGGGCUGGGCCAUGGUG |
| | | GAGAUCGACGAGGAGGAGAACCCCAUCCGGCUGAUCGACCUGGGCGUGCGGGUGUUCGAGCGGGCCGAGGUGCCCAAGACCGGCGACUCCC |
| | | UGGCCAUGGCCCGGCGGCUGGCCCGGUCCGUGCGGCGGCUGACCCGGCGGCGGGCCCACCGGCUGCUGCGGGCCCGGCGGCUGCUGAAGCG |
| | | GGAGGGCGUGCUGCAGGCCGCCGACUUCGACGAGAACGGCCUGAUCAAGUCCCUGCCCAACACCCCCUGGCAGCUGCGGGCCGCCGCCCUG |
| | | GACCGGAAGCUGACCCCCCUGGAGUGGUCCGCCGUGCUGCUGCACCUGAUCAAGCACCGGGGCUACCUGUCCCAGCGGAAGAACGAGGGCG |
| | | AGACCGCCGACAAGGAGCUGGGCGCCCUGCUGAAGGGCGUGGCCAACAACGCCCACGCCCUGCAGACCGGCGACUUCCGGACCCCCGCCGA |
| | | GCUGGCCCUGAACAAGUUCGAGAAGGAGUCCGGCCACAUCCGGAACCAGCGGGGCGACUACUCCCACACCUUCUCCCGGAAGGACCUGCAG |
| | | GCCGAGCUGAUCCUGCUGUUCGAGAAGCAGAAGGAGUUCGGCAACCCCCACGUGUCCGGCGGCCUGAAGGAGGGCAUCGAGACCCUGCUGA |
| | | UGACCCAGCGGCCCGCCCUGUCCGGCGACGCCGUGCAGAAGAUGCUGGGCCACUGCACCUUCGAGCCCGCCGAGCCCAAGGCCGCCAAGAA |
| | | CACCUACACCGCCGAGCGGUUCAUCUGGCUGACCAAGCUGAACAACCUGCGGAUCCUGGAGCAGGGCUCCGAGCGGCCCCUGACCGACACC |
| | | GAGCGGGCCACCCUGAUGGACGAGCCCUACCGGAAGUCCAAGCUGACCUACGCCCAGGCCCGGAAGCUGCUGGGCCUGGAGGACACCGCCU |
| | | UCUUCAAGGGCCUGCGGUACGGCAAGGACAACGCCGAGGCCUCCACCCUGAUGGAGAUGAAGGCCUACCACGCCAUCUCCCGGGCCCUGGA |
| | | GAAGGAGGGCCUGAAGGACAAGAAGUCCCCCCUGAACCUGUCCUCCGAGCUGCAGGACGAGAUCGGCACCGCCUUCUCCCUGUUCAAGACC |
| | | GACGAGGACAUCACCGGCCGGCUGAAGGACCGGGUGCAGCCCGAGAUCCUGGAGGCCCUGCUGAAGCACAUCUCCUUCGACAAGUUCGUGC |
| | | AGAUCUCCCUGAAGGCCCUGCGGCGGAUCGUGCCCCUGAUGGAGCAGGGCAAGCGGUACGACGAGGCCUGCGCCGAGAUCUACGGCGACCA |
| | | CUACGGCAAGAAGAACACCGAGGAGAAGAUCUACCUGCCCCCCAUCCCCGCCGACGAGAUCCGGAACCCCGUGGUGCUGCGGGCCCUGUCC |
| | | CAGGCCCGGAAGGUGAUCAACGGCGUGGUGCGGCGGUACGGCUCCCCCGCCCGGAUCCACAUCGAGACCGCCCGGGAGGUGGGCAAGUCCU |
| | | UCAAGGACCGGAAGGAGAUCGAGAAGCGGCAGGAGGAGAACCGGAAGGACCGGGAGAAGGCCGCCGCCAAGUUCCGGGAGUACUUCCCCAA |
| | | CUUCGUGGGCGAGCCCAAGUCCAAGGACAUCCUGAAGCUGCGGCUGUACGAGCAGCAGCACGGCAAGUGCCUGUACUCCGGCAAGGAGAUC |
| | | AACCUGGUGCGGCUGAACGAGAAGGGCUACGUGGAGAUCGACCACGCCCUGCCCUUCUCCCGGACCUGGGACGACUCCUUCAACAACAAGG |
| | | UGCUGGUGCUGGGCUCCGAGAACCAGAACAAGGGCAACCAGACCCCCUACGAGUACUUCAACGGCAAGGACAACUCCCGGGAGUGGCAGGA |
| | | GUUCAAGGCCCGGGUGGAGACCUCCCGGUUCCCCCGGUCCAAGAAGCAGCGGAUCCUGCUGCAGAAGUUCGACGAGGACGGCUUCAAGGAG |
| | | UGCAACCUGAACGACACCCGGUACGUGAACCGCUUCCUGUGCCAGUUCGUGGCCGACCACAUCCUGCUGACCGGCAAGGGCAAGCGGCGGG |
| | | UGUUCGCCUCCAACGGCCAGAUCACCAACCUGCUGCGGGGCUUCUGGGGCCUGCGGAAGGUGCGGGCCGAGAACGACCGGCACCACGCCCU |
| | | GGACGCCGUGGUGGUGGCCUGCUCCACCGUGGCCAUGCAGCAGAAGAUCACCCGGUUCGUGCGGUACAAGGAGAUGAACGCCUUCGACGGC |
| | | AAGACCAUCGACAAGGAGACCGGCAAGGUGCUGCACCAGAAGACCCACUUCCCCCAGCCCUGGGAGUUCUUCGCCCAGGAGGUGAUGAUCC |
| | | GGGUGUUCGGCAAGCCCGACGGCAAGCCCGAGUUCGAGGAGGCCGACACCCCCGAGAAGCUGCGGACCCUGCUGGCCGAGAAGCUGUCCUC |
| | | CCGGCCCGAGGCCGUGCACGAGUACGUGACCCCCCUGUUCGUGUCCCGGGCCCCCAACCGGAAGAUGUCCGGCGCCCACAAGGACACCCUG |
| | | CGGUCCGCCAAGCGGUUCGUGAAGCACAACGAGAAGAUCUCCGUGAAGCGGGUGUGGCUGACCGAGAUCAAGCUGGCCGACCUGGAGAACA |
| | | UGGUGAACUACAAGAACGGCCGGGAGAUCGAGCUGUACGAGGCCCUGAAGGCCCGGCUGGAGGCCUACGGCGGCAACGCCAAGCAGGCCUU |
| | | CGACCCCAAGGACAACCCCUUCUACAAGAAGGGCGGCCAGCUGGUGAAGGCCGUGCGGGUGGAGAAGACCCAGGAGUCCGGCGUGCUGCUG |
| | | AACAAGAAGAACGCCUACACCAUCGCCGACAACGGCGACAUGGUGCGGGUGGACGUGUUCUGCAAGGUGGACAAGAAGGGCAAGAACCAGU |
| | | ACUUCAUCGUGCCCAUCUACGCCUGGCAGGUGGCCGAGAACAUCCUGCCCGACAUCGACUGCAAGGGCUACCGGAUCGACGACUCCUACAC |
| | | CUUCUGCUUCUCCCUGCACAAGUACGACCUGAUCGCCUUCCAGAAGGACGAGAAGUCCAAGGUGGAGUUCGCCUACUACAUCAACUGCGAC |
| | | UCCUCCAACGGCCGGUUCUACCUGGCCUGGCACGACAAGGGCUCCAAGGAGCAGCAGUUCCGGAUCUCCACCCAGAACCUGGUGCUGAUCC |
| | | AGAAGUACCAGGUGAACGAGCUGGGCAAGGAGAUCCGGCCCUGCCGGCUGAAGAAGCGGCCCCCCGUGCGGUCCGGAAAGCGGACCGCCGA |
| | | CGGCUCCGGAGGAGGAAGCCCGAAGAAGAAGAGAAAGGUCAGCGAAAGCGCAACACCGGAAAGCGUCAGCGGAUGGAGACUGUUCAAGAAG |
| | | AUCAGCUAG |
| 55 | Cas9- | MDKKYSIGLDIGTNSVGWAVITDEYKVPSKKFKVLGNTDRHSIKKNLIGALLFDSGETAEATRLKRTARRRYTRRKNRICYLQEIFSNEMA |
| | Cas9 | KVDDSFFHRLEESFLVEEDKKHERHPIFGNIVDEVAYHEKYPTIYHLRKKLVDSTDKADLRLIYLALAHMIKFRGHFLIEGDLNPDNSDVD |
| | fusion- | KLFIQLVQTYNQLFEENPINASGVDAKAILSARLSKSRRLENLIAQLPGEKKNGLFGNLIALSLGLTPNFKSNFDLAEDAKLQLSKDTYDD |
| | 61 | DLDNLLAQIGDQYADLFLAAKNLSDAILLSDILRVNTEITKAPLSASMIKRYDEHHQDLTLLKALVRQQLPEKYKEIFFDQSKNGYAGYID |
| | amino | GGASQEEFYKFIKPILEKMDGTEELLVKLNREDLLRKQRTFDNGSIPHQIHLGELHAILRRQEDFYPFLKDNREKIEKILTFRIPYYVGPL |
| | acid | ARGNSRFAWMTRKSEETITPWNFEEVVDKGASAQSFIERMTNFDKNLPNEKVLPKHSLLYEYFTVYNELTKVKYVTEGMRKPAFLSGEQKK |
| | residue | AIVDLLFKTNRKVTVKQLKEDYFKKIECFDSVEISGVEDRFNASLGTYHDLLKIIKDKDFLDNEENEDILEDIVLTLTLFEDREMIEERLK |
| | linker | TYAHLFDDKVMKQLKRRRYTGWGRLSRKLINGIRDKQSGKTILDFLKSDGFANRNFMQLIHDDSLTFKEDIQKAQVSGQGDSLHEHIANLA |
| | and | GSPAIKKGILQTVKVVDELVKVMGRHKPENIVIEMARENQTTQKGQKNSRERMKRIEEGIKELGSQILKEHPVENTQLQNEKLYLYYLQNG |
| | HiBit | RDMYVDQELDINRLSDYDVDHIVPQSFLKDDSIDNKVLTRSDKNRGKSDNVPSEEVVKKMKNYWRQLLNAKLITQRKFDNLTKAERGGLSE |
| | tag | LDKAGFIKRQLVETRQITKHVAQILDSRMNTKYDENDKLIREVKVITLKSKLVSDFRKDFQFYKVREINNYHHAHDAYLNAVVGTALIKKY |
| | (mRNA | PKLESEFVYGDYKVYDVRKMIAKSEQEIGKATAKYFFYSNIMNFFKTEITLANGEIRKRPLIETNGETGEIVWDKGRDFATVRKVLSMPQV |
| | P)- | NIVKKTEVQTGGFSKESILPKRNSDKLIARKKDWDPKKYGGFDSPTVAYSVLVVAKVEKGKSKKLKSVKELLGITIMERSSFEKNPIDFLE |
| | amino | AKGYKEVKKDLIIKLPKYSLFELENGRKRMLASAGELQKGNELALPSKYVNFLYLASHYEKLKGSPEDNEQKQLFVEQHKHYLDEIIEQIS |
| | acid | EFSKRVILADANLDKVLSAYNKHRDKPIREQAENIIHLFTLTNLGAPAAFKYFDTTIDKKRYTSTKEVLDATLIHQSITGLYETRIDLSQL |
| | sequence | GGDGAPESATESGGTSTESEGSAGTSTESEGSAGSAGSTSTEEGTSTESEGSAGTSTESEGSSSGAAFKPNPINYILGLDIGIASVGWAMV |
| | | EIDEEENPIRLIDLGVRVFERAEVPKTGDSLAMARRLARSVRRLTRRRAHRLLRARRLLKREGVLQAADFDENGLIKSLPNTPWQLRAAAL |
| | | DRKLTPLEWSAVLLHLIKHRGYLSQRKNEGETADKELGALLKGVANNAHALQTGDFRTPAELALNKFEKESGHIRNQRGDYSHTFSRKDLQ |
| | | AELILLFEKQKEFGNPHVSGGLKEGIETLLMTQRPALSGDAVQKMLGHCTFEPAEPKAAKNTYTAERFIWLTKLNNLRILEQGSERPLTDT |
| | | ERATLMDEPYRKSKLTYAQARKLLGLEDTAFFKGLRYGKDNAEASTLMEMKAYHAISRALEKEGLKDKKSPLNLSSELQDEIGTAFSLFKT |
| | | DEDITGRLKDRVQPEILEALLKHISFDKFVQISLKALRRIVPLMEQGKRYDEACAEIYGDHYGKKNTEEKIYLPPIPADEIRNPVVLRALS |
| | | QARKVINGVVRRYGSPARIHIETAREVGKSFKDRKEIEKRQEENRKDREKAAAKFREYFPNFVGEPKSKDILKLRLYEQQHGKCLYSGKEI |
| | | NLVRLNEKGYVEIDHALPFSRTWDDSFNNKVLVLGSENQNKGNQTPYEYFNGKDNSREWQEFKARVETSRFPRSKKQRILLQKFDEDGFKE |
| | | CNLNDTRYVNRFLCQFVADHILLTGKGKRRVFASNGQITNLLRGFWGLRKVRAENDRHHALDAVVVACSTVAMQQKITRFVRYKEMNAFDG |
| | | KTIDKETGKVLHQKTHFPQPWEFFAQEVMIRVFGKPDGKPEFEEADTPEKLRTLLAEKLSSRPEAVHEYVTPLFVSRAPNRKMSGAHKDTL |
| | | RSAKRFVKHNEKISVKRVWLTEIKLADLENMVNYKNGREIELYEALKARLEAYGGNAKQAFDPKDNPFYKKGGQLVKAVRVEKTQESGVLL |
| | | NKKNAYTIADNGDMVRVDVFCKVDKKGKNQYFIVPIYAWQVAENILPDIDCKGYRIDDSYTFCFSLHKYDLIAFQKDEKSKVEFAYYINCD |
| | | SSNGRFYLAWHDKGSKEQQFRISTQNLVLIQKYQVNELGKEIRPCRLKKRPPVRSGKRTADGSGGGSPKKKRKVSESATPESVSGWRLFKK |
| | | IS* |
| 56 | Cas9- | AUGGACAAGAAGUACUCCAUCGGCCUGGACAUCGGCACCAACUCCGUGGGCUGGGCCGUGAUCACCGACGAGUACAAGGUGCCCUCCAAGA |
| | Cas9 | AGUUCAAGGUGCUGGGCAACACCGACCGGCACUCCAUCAAGAAGAACCUGAUCGGCGCCCUGCUGUUCGACUCCGGCGAGACCGCCGAGGC |
| | fusion- | CACCCGGCUGAAGCGGACCGCCCGGCGGCGGUACACCCGGCGGAAGAACCGGAUCUGCUACCUGCAGGAGAUCUUCUCCAACGAGAUGGCC |
| | 61 | AAGGUGGACGACUCCUUCUUCCACCGGCUGGAGGAGUCCUUCCUGGUGGAGGAGGACAAGAAGCACGAGCGGCACCCCAUCUUCGGCAACA |
| | amino | UCGUGGACGAGGUGGCCUACCACGAGAAGUACCCCACCAUCUACCACCUGCGGAAGAAGCUGGUGGACUCCACCGACAAGGCCGACCUGCG |
| | acid | GCUGAUCUACCUGGCCCUGGCCCACAUGAUCAAGUUCCGGGGCCACUUCCUGAUCGAGGGCGACCUGAACCCCGACAACUCCGACGUGGAC |
| | residual | AAGCUGUUCAUCCAGCUGGUGCAGACCUACAACCAGCUGUUCGAGGAGAACCCCAUCAACGCCUCCGGCGUGGACGCCAAGGCCAUCCUGU |
| | linker | CCGCCCGGCUGUCCAAGUCCCGGCGGCUGGAGAACCUGAUCGCCCAGCUGCCCGGCGAGAAGAAGAACGGCCUGUUCGGCAACCUGAUCGC |
| | (mRNA | CCUGUCCCUGGGCCUGACCCCCAACUUCAAGUCCAACUUCGACCUGGCCGAGGACGCCAAGCUGCAGCUGUCCAAGGACACCUACGACGAC |
| | P)- | GACCUGGACAACCUGCUGGCCCAGAUCGGCGACCAGUACGCCGACCUGUUCCUGGCCGCCAAGAACCUGUCCGACGCCAUCCUGCUGUCCG |
| | mRNA | ACAUCCUGCGGGUGAACACCGAGAUCACCAAGGCCCCCCUGUCCGCCUCCAUGAUCAAGCGGUACGACGAGCACCACCAGGACCUGACCCU |
| | sequence | GCUGAAGGCCCUGGUGCGGCAGCAGCUGCCCGAGAAGUACAAGGAGAUCUUCUUCGACCAGUCCAAGAACGGCUACGCCGGCUACAUCGAC |
| | | GGCGGCGCCUCCCAGGAGGAGUUCUACAAGUUCAUCAAGCCCAUCCUGGAGAAGAUGGACGGCACCGAGGAGCUGCUGGUGAAGCUGAACC |
| | | GGGAGGACCUGCUGCGGAAGCAGCGGACCUUCGACAACGGCUCCAUCCCCCACCAGAUCCACCUGGGCGAGCUGCACGCCAUCCUGCGGCG |
| | | GCAGGAGGACUUCUACCCCUUCCUGAAGGACAACCGGGAGAAGAUCGAGAAGAUCCUGACCUUCCGGAUCCCCUACUACGUGGGCCCCCUG |
| | | GCCCGGGGCAACUCCCGGUUCGCCUGGAUGACCCGGAAGUCCGAGGAGACCAUCACCCCCUGGAACUUCGAGGAGGUGGUGGACAAGGGCG |
| | | CCUCCGCCCAGUCCUUCAUCGAGCGGAUGACCAACUUCGACAAGAACCUGCCCAACGAGAAGGUGCUGCCCAAGCACUCCCUGCUGUACGA |
| | | GUACUUCACCGUGUACAACGAGCUGACCAAGGUGAAGUACGUGACCGAGGGCAUGCGGAAGCCCGCCUUCCUGUCCGGCGAGCAGAAGAAG |
| | | GCCAUCGUGGACCUGCUGUUCAAGACCAACCGGAAGGUGACCGUGAAGCAGCUGAAGGAGGACUACUUCAAGAAGAUCGAGUGCUUCGACU |
| | | CCGUGGAGAUCUCCGGCGUGGAGGACCGGUUCAACGCCUCCCUGGGCACCUACCACGACCUGCUGAAGAUCAUCAAGGACAAGGACUUCCU |
| | | GGACAACGAGGAGAACGAGGACAUCCUGGAGGACAUCGUGCUGACCCUGACCCUGUUCGAGGACCGGGAGAUGAUCGAGGAGCGGCUGAAG |
| | | ACCUACGCCCACCUGUUCGACGACAAGGUGAUGAAGCAGCUGAAGCGGCGGCGGUACACCGGCUGGGGCCGGCUGUCCCGGAAGCUGAUCA |
| | | ACGGCAUCCGGGACAAGCAGUCCGGCAAGACCAUCCUGGACUUCCUGAAGUCCGACGGCUUCGCCAACCGGAACUUCAUGCAGCUGAUCCA |
| | | CGACGACUCCCUGACCUUCAAGGAGGACAUCCAGAAGGCCCAGGUGUCCGGCCAGGGCGACUCCCUGCACGAGCACAUCGCCAACCUGGCC |
| | | GGCUCCCCCGCCAUCAAGAAGGGCAUCCUGCAGACCGUGAAGGUGGUGGACGAGCUGGUGAAGGUGAUGGGCCGGCACAAGCCCGAGAACA |
| | | UCGUGAUCGAGAUGGCCCGGGAGAACCAGACCACCCAGAAGGGCCAGAAGAACUCCCGGGAGCGGAUGAAGCGGAUCGAGGAGGGCAUCAA |
| | | GGAGCUGGGCUCCCAGAUCCUGAAGGAGCACCCCGUGGAGAACACCCAGCUGCAGAACGAGAAGCUGUACCUGUACUACCUGCAGAACGGC |
| | | CGGGACAUGUACGUGGACCAGGAGCUGGACAUCAACCGGCUGUCCGACUACGACGUGGACCACAUCGUGCCCCAGUCCUUCCUGAAGGACG |
| | | ACUCCAUCGACAACAAGGUGCUGACCCGGUCCGACAAGAACCGGGGCAAGUCCGACAACGUGCCCUCCGAGGAGGUGGUGAAGAAGAUGAA |
| | | GAACUACUGGCGGCAGCUGCUGAACGCCAAGCUGAUCACCCAGCGGAAGUUCGACAACCUGACCAAGGCCGAGCGGGGCGGCCUGUCCGAG |
| | | CUGGACAAGGCCGGCUUCAUCAAGCGGCAGCUGGUGGAGACCCGGCAGAUCACCAAGCACGUGGCCCAGAUCCUGGACUCCCGGAUGAACA |
| | | CCAAGUACGACGAGAACGACAAGCUGAUCCGGGAGGUGAAGGUGAUCACCCUGAAGUCCAAGCUGGUGUCCGACUUCCGGAAGGACUUCCA |
| | | GUUCUACAAGGUGCGGGAGAUCAACAACUACCACCACGCCCACGACGCCUACCUGAACGCCGUGGUGGGCACCGCCCUGAUCAAGAAGUAC |
| | | CCCAAGCUGGAGUCCGAGUUCGUGUACGGCGACUACAAGGUGUACGACGUGCGGAAGAUGAUCGCCAAGUCCGAGCAGGAGAUCGGCAAGG |
| | | CCACCGCCAAGUACUUCUUCUACUCCAACAUCAUGAACUUCUUCAAGACCGAGAUCACCCUGGCCAACGGCGAGAUCCGGAAGCGGCCCCU |
| | | GAUCGAGACCAACGGCGAGACCGGCGAGAUCGUGUGGGACAAGGGCCGGGACUUCGCCACCGUGCGGAAGGUGCUGUCCAUGCCCCAGGUG |
| | | AACAUCGUGAAGAAGACCGAGGUGCAGACCGGCGGCUUCUCCAAGGAGUCCAUCCUGCCCAAGCGGAACUCCGACAAGCUGAUCGCCCGGA |
| | | AGAAGGACUGGGACCCCAAGAAGUACGGCGGCUUCGACUCCCCCACCGUGGCCUACUCCGUGCUGGUGGUGGCCAAGGUGGAGAAGGGCAA |
| | | GUCCAAGAAGCUGAAGUCCGUGAAGGAGCUGCUGGGCAUCACCAUCAUGGAGCGGUCCUCCUUCGAGAAGAACCCCAUCGACUUCCUGGAG |
| | | GCCAAGGGCUACAAGGAGGUGAAGAAGGACCUGAUCAUCAAGCUGCCCAAGUACUCCCUGUUCGAGCUGGAGAACGGCCGGAAGCGGAUGC |
| | | UGGCCUCCGCCGGCGAGCUGCAGAAGGGCAACGAGCUGGCCCUGCCCUCCAAGUACGUGAACUUCCUGUACCUGGCCUCCCACUACGAGAA |
| | | GCUGAAGGGCUCCCCCGAGGACAACGAGCAGAAGCAGCUGUUCGUGGAGCAGCACAAGCACUACCUGGACGAGAUCAUCGAGCAGAUCUCC |
| | | GAGUUCUCCAAGCGGGUGAUCCUGGCCGACGCCAACCUGGACAAGGUGCUGUCCGCCUACAACAAGCACCGGGACAAGCCCAUCCGGGAGC |
| | | AGGCCGAGAACAUCAUCCACCUGUUCACCCUGACCAACCUGGGCGCCCCCGCCGCCUUCAAGUACUUCGACACCACCAUCGACAAGAAGCG |
| | | GUACACCUCCACCAAGGAGGUGCUGGACGCCACCCUGAUCCACCAGUCCAUCACCGGCCUGUACGAGACCCGGAUCGACCUGUCCCAGCUG |
| | | GGCGGCGACGGCGCCCCCGAGUCCGCCACCGAGUCCGGCGGCACCUCCACCGAGUCCGAGGGCUCCGCCGGCACCUCCACCGAGUCCGAGG |
| | | GCUCCGCCGGCUCCGCCGGCUCCACCUCCACCGAGGAGGGCACCUCCACCGAGUCCGAGGGCUCCGCCGGCACCUCCACCGAGUCCGAGGG |
| | | CUCCUCCUCCGGUGCCGCCUUCAAGCCCAACCCCAUCAACUACAUCCUGGGCCUGGACAUCGGCAUCGCCUCCGUGGGCUGGGCCAUGGUG |
| | | GAGAUCGACGAGGAGGAGAACCCCAUCCGGCUGAUCGACCUGGGCGUGCGGGUGUUCGAGCGGGCCGAGGUGCCCAAGACCGGCGACUCCC |
| | | UGGCCAUGGCCCGGCGGCUGGCCCGGUCCGUGCGGCGGCUGACCCGGGGGGGGGCCCACCGGCUGCUGCGGGCCCGGCGGCUGCUGAAGCG |
| | | GGAGGGCGUGCUGCAGGCCGCCGACUUCGACGAGAACGGCCUGAUCAAGUCCCUGCCCAACACCCCCUGGCAGCUGCGGGCCGCCGCCCUG |
| | | GACCGGAAGCUGACCCCCCUGGAGUGGUCCGCCGUGCUGCUGCACCUGAUCAAGCACCGGGGCUACCUGUCCCAGCGGAAGAACGAGGGCG |
| | | AGACCGCCGACAAGGAGCUGGGCGCCCUGCUGAAGGGCGUGGCCAACAACGCCCACGCCCUGCAGACCGGCGACUUCCGGACCCCCGCCGA |
| | | GCUGGCCCUGAACAAGUUCGAGAAGGAGUCCGGCCACAUCCGGAACCAGCGGGGCGACUACUCCCACACCUUCUCCCGGAAGGACCUGCAG |
| | | GCCGAGCUGAUCCUGCUGUUCGAGAAGCAGAAGGAGUUCGGCAACCCCCACGUGUCCGGCGGCCUGAAGGAGGGCAUCGAGACCCUGCUGA |
| | | UGACCCAGCGGCCCGCCCUGUCCGGCGACGCCGUGCAGAAGAUGCUGGGCCACUGCACCUUCGAGCCCGCCGAGCCCAAGGCCGCCAAGAA |
| | | CACCUACACCGCCGAGCGGUUCAUCUGGCUGACCAAGCUGAACAACCUGCGGAUCCUGGAGCAGGGCUCCGAGCGGCCCCUGACCGACACC |
| | | GAGCGGGCCACCCUGAUGGACGAGCCCUACCGGAAGUCCAAGCUGACCUACGCCCAGGCCCGGAAGCUGCUGGGCCUGGAGGACACCGCCU |
| | | UCUUCAAGGGCCUGCGGUACGGCAAGGACAACGCCGAGGCCUCCACCCUGAUGGAGAUGAAGGCCUACCACGCCAUCUCCCGGGCCCUGGA |
| | | GAAGGAGGGCCUGAAGGACAAGAAGUCCCCCCUGAACCUGUCCUCCGAGCUGCAGGACGAGAUCGGCACCGCCUUCUCCCUGUUCAAGACC |
| | | GACGAGGACAUCACCGGCCGGCUGAAGGACCGGGUGCAGCCCGAGAUCCUGGAGGCCCUGCUGAAGCACAUCUCCUUCGACAAGUUCGUGC |
| | | AGAUCUCCCUGAAGGCCCUGCGGCGGAUCGUGCCCCUGAUGGAGCAGGGCAAGCGGUACGACGAGGCCUGCGCCGAGAUCUACGGCGACCA |
| | | CUACGGCAAGAAGAACACCGAGGAGAAGAUCUACCUGCCCCCCAUCCCCGCCGACGAGAUCCGGAACCCCGUGGUGCUGCGGGCCCUGUCC |
| | | CAGGCCCGGAAGGUGAUCAACGGCGUGGUGCGGCGGUACGGCUCCCCCGCCCGGAUCCACAUCGAGACCGCCCGGGAGGUGGGCAAGUCCU |
| | | UCAAGGACCGGAAGGAGAUCGAGAAGCGGCAGGAGGAGAACCGGAAGGACCGGGAGAAGGCCGCCGCCAAGUUCCGGGAGUACUUCCCCAA |
| | | CUUCGUGGGCGAGCCCAAGUCCAAGGACAUCCUGAAGCUGCGGCUGUACGAGCAGCAGCACGGCAAGUGCCUGUACUCCGGCAAGGAGAUC |
| | | AACCUGGUGCGGCUGAACGAGAAGGGCUACGUGGAGAUCGACCACGCCCUGCCCUUCUCCCGGACCUGGGACGACUCCUUCAACAACAAGG |
| | | UGCUGGUGCUGGGCUCCGAGAACCAGAACAAGGGCAACCAGACCCCCUACGAGUACUUCAACGGCAAGGACAACUCCCGGGAGUGGCAGGA |
| | | GUUCAAGGCCCGGGUGGAGACCUCCCGGUUCCCCCGGUCCAAGAAGCAGCGGAUCCUGCUGCAGAAGUUCGACGAGGACGGCUUCAAGGAG |
| | | UGCAACCUGAACGACACCCGGUACGUGAACCGCUUCCUGUGCCAGUUCGUGGCCGACCACAUCCUGCUGACCGGCAAGGGCAAGCGGCGGG |
| | | UGUUCGCCUCCAACGGCCAGAUCACCAACCUGCUGCGGGGCUUCUGGGGCCUGCGGAAGGUGCGGGCCGAGAACGACCGGCACCACGCCCU |
| | | GGACGCCGUGGUGGUGGCCUGCUCCACCGUGGCCAUGCAGCAGAAGAUCACCCGGUUCGUGCGGUACAAGGAGAUGAACGCCUUCGACGGC |
| | | AAGACCAUCGACAAGGAGACCGGCAAGGUGCUGCACCAGAAGACCCACUUCCCCCAGCCCUGGGAGUUCUUCGCCCAGGAGGUGAUGAUCC |
| | | GGGUGUUCGGCAAGCCCGACGGCAAGCCCGAGUUCGAGGAGGCCGACACCCCCGAGAAGCUGCGGACCCUGCUGGCCGAGAAGCUGUCCUC |
| | | CCGGCCCGAGGCCGUGCACGAGUACGUGACCCCCCUGUUCGUGUCCCGGGCCCCCAACCGGAAGAUGUCCGGCGCCCACAAGGACACCCUG |
| | | CGGUCCGCCAAGCGGUUCGUGAAGCACAACGAGAAGAUCUCCGUGAAGCGGGUGUGGCUGACCGAGAUCAAGCUGGCCGACCUGGAGAACA |
| | | UGGUGAACUACAAGAACGGCCGGGAGAUCGAGCUGUACGAGGCCCUGAAGGCCCGGCUGGAGGCCUACGGCGGCAACGCCAAGCAGGCCUU |
| | | CGACCCCAAGGACAACCCCUUCUACAAGAAGGGCGGCCAGCUGGUGAAGGCCGUGCGGGUGGAGAAGACCCAGGAGUCCGGCGUGCUGCUG |
| | | AACAAGAAGAACGCCUACACCAUCGCCGACAACGGCGACAUGGUGCGGGUGGACGUGUUCUGCAAGGUGGACAAGAAGGGCAAGAACCAGU |
| | | ACUUCAUCGUGCCCAUCUACGCCUGGCAGGUGGCCGAGAACAUCCUGCCCGACAUCGACUGCAAGGGCUACCGGAUCGACGACUCCUACAC |
| | | CUUCUGCUUCUCCCUGCACAAGUACGACCUGAUCGCCUUCCAGAAGGACGAGAAGUCCAAGGUGGAGUUCGCCUACUACAUCAACUGCGAC |
| | | UCCUCCAACGGCCGGUUCUACCUGGCCUGGCACGACAAGGGCUCCAAGGAGCAGCAGUUCCGGAUCUCCACCCAGAACCUGGUGCUGAUCC |
| | | AGAAGUACCAGGUGAACGAGCUGGGCAAGGAGAUCCGGCCCUGCCGGCUGAAGAAGCGGCCCCCCGUGCGGUCCGGAAAGCGGACCGCCGA |
| | | CGGCUCCGGAGGAGGAAGCCCGAAGAAGAAGAGAAAGGUCUAG |
| 57 | Cas9- | MDKKYSIGLDIGTNSVGWAVITDEYKVPSKKFKVLGNTDRHSIKKNLIGALLFDSGETAEATRLKRTARRRYTRRKNRICYLQEIFSNEMA |
| | Cas9 | KVDDSFFHRLEESFLVEEDKKHERHPIFGNIVDEVAYHEKYPTIYHLRKKLVDSTDKADLRLIYLALAHMIKFRGHFLIEGDLNPDNSDVD |
| | fusion- | KLFIQLVQTYNQLFEENPINASGVDAKAILSARLSKSRRLENLIAQLPGEKKNGLFGNLIALSLGLTPNFKSNFDLAEDAKLQLSKDTYDD |
| | 61 | DLDNLLAQIGDQYADLFLAAKNLSDAILLSDILRVNTEITKAPLSASMIKRYDEHHQDLTLLKALVRQQLPEKYKEIFFDQSKNGYAGYID |
| | amino | GGASQEEFYKFIKPILEKMDGTEELLVKLNREDLLRKQRTFDNGSIPHQIHLGELHAILRRQEDFYPFLKDNREKIEKILTFRIPYYVGPL |
| | acid | ARGNSRFAWMTRKSEETITPWNFEEVVDKGASAQSFIERMTNFDKNLPNEKVLPKHSLLYEYFTVYNELTKVKYVTEGMRKPAFLSGEQKK |
| | residual | AIVDLLFKTNRKVTVKQLKEDYFKKIECFDSVEISGVEDRFNASLGTYHDLLKIIKDKDFLDNEENEDILEDIVLTLTLFEDREMIEERLK |
| | linker | TYAHLFDDKVMKQLKRRRYTGWGRLSRKLINGIRDKQSGKTILDFLKSDGFANRNFMQLIHDDSLTFKEDIQKAQVSGQGDSLHEHIANLA |
| | (mRNA | GSPAIKKGILQTVKVVDELVKVMGRHKPENIVIEMARENQTTQKGQKNSRERMKRIEEGIKELGSQILKEHPVENTQLQNEKLYLYYLQNG |
| | P)- | RDMYVDQELDINRLSDYDVDHIVPQSFLKDDSIDNKVLTRSDKNRGKSDNVPSEEVVKKMKNYWRQLLNAKLITQRKFDNLTKAERGGLSE |
| | amino | LDKAGFIKRQLVETRQITKHVAQILDSRMNTKYDENDKLIREVKVITLKSKLVSDFRKDFQFYKVREINNYHHAHDAYLNAVVGTALIKKY |
| | acid | PKLESEFVYGDYKVYDVRKMIAKSEQEIGKATAKYFFYSNIMNFFKTEITLANGEIRKRPLIETNGETGEIVWDKGRDFATVRKVLSMPQV |
| | sequence | NIVKKTEVQTGGFSKESILPKRNSDKLIARKKDWDPKKYGGFDSPTVAYSVLVVAKVEKGKSKKLKSVKELLGITIMERSSFEKNPIDFLE |
| | | AKGYKEVKKDLIIKLPKYSLFELENGRKRMLASAGELQKGNELALPSKYVNFLYLASHYEKLKGSPEDNEQKQLFVEQHKHYLDEIIEQIS |
| | | EFSKRVILADANLDKVLSAYNKHRDKPIREQAENIIHLFTLTNLGAPAAFKYFDTTIDKKRYTSTKEVLDATLIHQSITGLYETRIDLSQL |
| | | GGDGAPESATESGGTSTESEGSAGTSTESEGSAGSAGSTSTEEGTSTESEGSAGTSTESEGSSSGAAFKPNPINYILGLDIGIASVGWAMV |
| | | EIDEEENPIRLIDLGVRVFERAEVPKTGDSLAMARRLARSVRRLTRRRAHRLLRARRLLKREGVLQAADFDENGLIKSLPNTPWQLRAAAL |
| | | DRKLTPLEWSAVLLHLIKHRGYLSQRKNEGETADKELGALLKGVANNAHALQTGDFRTPAELALNKFEKESGHIRNQRGDYSHTFSRKDLQ |
| | | AELILLFEKQKEFGNPHVSGGLKEGIETLLMTQRPALSGDAVQKMLGHCTFEPAEPKAAKNTYTAERFIWLTKLNNLRILEQGSERPLTDT |
| | | ERATLMDEPYRKSKLTYAQARKLLGLEDTAFFKGLRYGKDNAEASTLMEMKAYHAISRALEKEGLKDKKSPLNLSSELQDEIGTAFSLFKT |
| | | DEDITGRLKDRVQPEILEALLKHISFDKFVQISLKALRRIVPLMEQGKRYDEACAEIYGDHYGKKNTEEKIYLPPIPADEIRNPVVLRALS |
| | | QARKVINGVVRRYGSPARIHIETAREVGKSFKDRKEIEKRQEENRKDREKAAAKFREYFPNFVGEPKSKDILKLRLYEQQHGKCLYSGKEI |
| | | NLVRLNEKGYVEIDHALPFSRTWDDSFNNKVLVLGSENQNKGNQTPYEYFNGKDNSREWQEFKARVETSRFPRSKKQRILLQKFDEDGFKE |
| | | CNLNDTRYVNRFLCQFVADHILLTGKGKRRVFASNGQITNLLRGFWGLRKVRAENDRHHALDAVVVACSTVAMQQKITRFVRYKEMNAFDG |
| | | KTIDKETGKVLHQKTHFPQPWEFFAQEVMIRVFGKPDGKPEFEEADTPEKLRTLLAEKLSSRPEAVHEYVTPLFVSRAPNRKMSGAHKDTL |
| | | RSAKRFVKHNEKISVKRVWLTEIKLADLENMVNYKNGREIELYEALKARLEAYGGNAKQAFDPKDNPFYKKGGQLVKAVRVEKTQESGVLL |
| | | NKKNAYTIADNGDMVRVDVFCKVDKKGKNQYFIVPIYAWQVAENILPDIDCKGYRIDDSYTFCFSLHKYDLIAFQKDEKSKVEFAYYINCD |
| | | SSNGRFYLAWHDKGSKEQQFRISTQNLVLIQKYQVNELGKEIRPCRLKKRPPVRSGKRTADGSGGGSPKKKRKV* |
| 58 | Cas9- | GGGAAGCUCAGAAUAAACGCUCAACUUUGGCCGGAUCUGCCACCAUGGACAAGAAGUACUCCAUCGGCCUGGACAUCGGCACCAACUCCGU |
| | Cas9 | GGGCUGGGCCGUGAUCACCGACGAGUACAAGGUGCCCUCCAAGAAGUUCAAGGUGCUGGGCAACACCGACCGGCACUCCAUCAAGAAGAAC |
| | fusion- | CUGAUCGGCGCCCUGCUGUUCGACUCCGGCGAGACCGCCGAGGCCACCCGGCUGAAGCGGACCGCCCGGCGGCGGUACACCCGGCGGAAGA |
| | 51 | ACCGGAUCUGCUACCUGCAGGAGAUCUUCUCCAACGAGAUGGCCAAGGUGGACGACUCCUUCUUCCACCGGCUGGAGGAGUCCUUCCUGGU |
| | amino | GGAGGAGGACAAGAAGCACGAGCGGCACCCCAUCUUCGGCAACAUCGUGGACGAGGUGGCCUACCACGAGAAGUACCCCACCAUCUACCAC |
| | acid | CUGCGGAAGAAGCUGGUGGACUCCACCGACAAGGCCGACCUGCGGCUGAUCUACCUGGCCCUGGCCCACAUGAUCAAGUUCCGGGGCCACU |
| | residue | UCCUGAUCGAGGGCGACCUGAACCCCGACAACUCCGACGUGGACAAGCUGUUCAUCCAGCUGGUGCAGACCUACAACCAGCUGUUCGAGGA |
| | linker | GAACCCCAUCAACGCCUCCGGCGUGGACGCCAAGGCCAUCCUGUCCGCCCGGCUGUCCAAGUCCCGGCGGCUGGAGAACCUGAUCGCCCAG |
| | and | CUGCCCGGCGAGAAGAAGAACGGCCUGUUCGGCAACCUGAUCGCCCUGUCCCUGGGCCUGACCCCCAACUUCAAGUCCAACUUCGACCUGG |
| | HiBit | CCGAGGACGCCAAGCUGCAGCUGUCCAAGGACACCUACGACGACGACCUGGACAACCUGCUGGCCCAGAUCGGCGACCAGUACGCCGACCU |
| | tag | GUUCCUGGCCGCCAAGAACCUGUCCGACGCCAUCCUGCUGUCCGACAUCCUGCGGGUGAACACCGAGAUCACCAAGGCCCCCCUGUCCGCC |
| | (mRNA | UCCAUGAUCAAGCGGUACGACGAGCACCACCAGGACCUGACCCUGCUGAAGGCCCUGGUGCGGCAGCAGCUGCCCGAGAAGUACAAGGAGA |
| | Q)- | UCUUCUUCGACCAGUCCAAGAACGGCUACGCCGGCUACAUCGACGGCGGCGCCUCCCAGGAGGAGUUCUACAAGUUCAUCAAGCCCAUCCU |
| | mRNA | GGAGAAGAUGGACGGCACCGAGGAGCUGCUGGUGAAGCUGAACCGGGAGGACCUGCUGCGGAAGCAGCGGACCUUCGACAACGGCUCCAUC |
| | sequence | CCCCACCAGAUCCACCUGGGCGAGCUGCACGCCAUCCUGCGGCGGCAGGAGGACUUCUACCCCUUCCUGAAGGACAACCGGGAGAAGAUCG |
| | | AGAAGAUCCUGACCUUCCGGAUCCCCUACUACGUGGGCCCCCUGGCCCGGGGCAACUCCCGGUUCGCCUGGAUGACCCGGAAGUCCGAGGA |
| | | GACCAUCACCCCCUGGAACUUCGAGGAGGUGGUGGACAAGGGCGCCUCCGCCCAGUCCUUCAUCGAGCGGAUGACCAACUUCGACAAGAAC |
| | | CUGCCCAACGAGAAGGUGCUGCCCAAGCACUCCCUGCUGUACGAGUACUUCACCGUGUACAACGAGCUGACCAAGGUGAAGUACGUGACCG |
| | | AGGGCAUGCGGAAGCCCGCCUUCCUGUCCGGCGAGCAGAAGAAGGCCAUCGUGGACCUGCUGUUCAAGACCAACCGGAAGGUGACCGUGAA |
| | | GCAGCUGAAGGAGGACUACUUCAAGAAGAUCGAGUGCUUCGACUCCGUGGAGAUCUCCGGCGUGGAGGACCGGUUCAACGCCUCCCUGGGC |
| | | ACCUACCACGACCUGCUGAAGAUCAUCAAGGACAAGGACUUCCUGGACAACGAGGAGAACGAGGACAUCCUGGAGGACAUCGUGCUGACCC |
| | | UGACCCUGUUCGAGGACCGGGAGAUGAUCGAGGAGCGGCUGAAGACCUACGCCCACCUGUUCGACGACAAGGUGAUGAAGCAGCUGAAGCG |
| | | GCGGCGGUACACCGGCUGGGGCCGGCUGUCCCGGAAGCUGAUCAACGGCAUCCGGGACAAGCAGUCCGGCAAGACCAUCCUGGACUUCCUG |
| | | AAGUCCGACGGCUUCGCCAACCGGAACUUCAUGCAGCUGAUCCACGACGACUCCCUGACCUUCAAGGAGGACAUCCAGAAGGCCCAGGUGU |
| | | CCGGCCAGGGCGACUCCCUGCACGAGCACAUCGCCAACCUGGCCGGCUCCCCCGCCAUCAAGAAGGGCAUCCUGCAGACCGUGAAGGUGGU |
| | | GGACGAGCUGGUGAAGGUGAUGGGCCGGCACAAGCCCGAGAACAUCGUGAUCGAGAUGGCCCGGGAGAACCAGACCACCCAGAAGGGCCAG |
| | | AAGAACUCCCGGGAGCGGAUGAAGCGGAUCGAGGAGGGCAUCAAGGAGCUGGGCUCCCAGAUCCUGAAGGAGCACCCCGUGGAGAACACCC |
| | | AGCUGCAGAACGAGAAGCUGUACCUGUACUACCUGCAGAACGGCCGGGACAUGUACGUGGACCAGGAGCUGGACAUCAACCGGCUGUCCGA |
| | | CUACGACGUGGACCACAUCGUGCCCCAGUCCUUCCUGAAGGACGACUCCAUCGACAACAAGGUGCUGACCCGGUCCGACAAGAACCGGGGC |
| | | AAGUCCGACAACGUGCCCUCCGAGGAGGUGGUGAAGAAGAUGAAGAACUACUGGCGGCAGCUGCUGAACGCCAAGCUGAUCACCCAGCGGA |
| | | AGUUCGACAACCUGACCAAGGCCGAGCGGGGCGGCCUGUCCGAGCUGGACAAGGCCGGCUUCAUCAAGCGGCAGCUGGUGGAGACCCGGCA |
| | | GAUCACCAAGCACGUGGCCCAGAUCCUGGACUCCCGGAUGAACACCAAGUACGACGAGAACGACAAGCUGAUCCGGGAGGUGAAGGUGAUC |
| | | ACCCUGAAGUCCAAGCUGGUGUCCGACUUCCGGAAGGACUUCCAGUUCUACAAGGUGCGGGAGAUCAACAACUACCACCACGCCCACGACG |
| | | CCUACCUGAACGCCGUGGUGGGCACCGCCCUGAUCAAGAAGUACCCCAAGCUGGAGUCCGAGUUCGUGUACGGCGACUACAAGGUGUACGA |
| | | CGUGCGGAAGAUGAUCGCCAAGUCCGAGCAGGAGAUCGGCAAGGCCACCGCCAAGUACUUCUUCUACUCCAACAUCAUGAACUUCUUCAAG |
| | | ACCGAGAUCACCCUGGCCAACGGCGAGAUCCGGAAGCGGCCCCUGAUCGAGACCAACGGCGAGACCGGCGAGAUCGUGUGGGACAAGGGCC |
| | | GGGACUUCGCCACCGUGCGGAAGGUGCUGUCCAUGCCCCAGGUGAACAUCGUGAAGAAGACCGAGGUGCAGACCGGCGGCUUCUCCAAGGA |
| | | GUCCAUCCUGCCCAAGCGGAACUCCGACAAGCUGAUCGCCCGGAAGAAGGACUGGGACCCCAAGAAGUACGGCGGCUUCGACUCCCCCACC |
| | | GUGGCCUACUCCGUGCUGGUGGUGGCCAAGGUGGAGAAGGGCAAGUCCAAGAAGCUGAAGUCCGUGAAGGAGCUGCUGGGCAUCACCAUCA |
| | | UGGAGCGGUCCUCCUUCGAGAAGAACCCCAUCGACUUCCUGGAGGCCAAGGGCUACAAGGAGGUGAAGAAGGACCUGAUCAUCAAGCUGCC |
| | | CAAGUACUCCCUGUUCGAGCUGGAGAACGGCCGGAAGCGGAUGCUGGCCUCCGCCGGCGAGCUGCAGAAGGGCAACGAGCUGGCCCUGCCC |
| | | UCCAAGUACGUGAACUUCCUGUACCUGGCCUCCCACUACGAGAAGCUGAAGGGCUCCCCCGAGGACAACGAGCAGAAGCAGCUGUUCGUGG |
| | | AGCAGCACAAGCACUACCUGGACGAGAUCAUCGAGCAGAUCUCCGAGUUCUCCAAGCGGGUGAUCCUGGCCGACGCCAACCUGGACAAGGU |
| | | GCUGUCCGCCUACAACAAGCACCGGGACAAGCCCAUCCGGGAGCAGGCCGAGAACAUCAUCCACCUGUUCACCCUGACCAACCUGGGCGCC |
| | | CCCGCCGCCUUCAAGUACUUCGACACCACCAUCGACAAGAAGCGGUACACCUCCACCAAGGAGGUGCUGGACGCCACCCUGAUCCACCAGU |
| | | CCAUCACCGGCCUGUACGAGACCCGGAUCGACCUGUCCCAGCUGGGGGGCGACGGCGCCCCCGAGUCCGCCACCGAGUCCGGCGGCACCUC |
| | | CACCGAGUCCGAGGGCUCCGCCGGCACCUCCACCGAGUCCGAGGGCUCCGCCGGCUCCGCCGGCUCCACCUCCACCGAGGAGGGCACCUCC |
| | | ACCGAGUCCGAGGGCUCCUCCUCCGGUGCCGCCUUCAAGCCCAACCCCAUCAACUACAUCCUGGGCCUGGACAUCGGCAUCGCCUCCGUGG |
| | | GCUGGGCCAUGGUGGAGAUCGACGAGGAGGAGAACCCCAUCCGGCUGAUCGACCUGGGCGUGCGGGUGUUCGAGCGGGCCGAGGUGCCCAA |
| | | GACCGGCGACUCCCUGGCCAUGGCCCGGCGGCUGGCCCGGUCCGUGCGGCGGCUGACCCGGGGGGGGGCCCACCGGCUGCUGCGGGCCCGG |
| | | CGGCUGCUGAAGCGGGAGGGCGUGCUGCAGGCCGCCGACUUCGACGAGAACGGCCUGAUCAAGUCCCUGCCCAACACCCCCUGGCAGCUGC |
| | | GGGCCGCCGCCCUGGACCGGAAGCUGACCCCCCUGGAGUGGUCCGCCGUGCUGCUGCACCUGAUCAAGCACCGGGGCUACCUGUCCCAGCG |
| | | GAAGAACGAGGGCGAGACCGCCGACAAGGAGCUGGGCGCCCUGCUGAAGGGCGUGGCCAACAACGCCCACGCCCUGCAGACCGGCGACUUC |
| | | CGGACCCCCGCCGAGCUGGCCCUGAACAAGUUCGAGAAGGAGUCCGGCCACAUCCGGAACCAGCGGGGCGACUACUCCCACACCUUCUCCC |
| | | GGAAGGACCUGCAGGCCGAGCUGAUCCUGCUGUUCGAGAAGCAGAAGGAGUUCGGCAACCCCCACGUGUCCGGCGGCCUGAAGGAGGGCAU |
| | | CGAGACCCUGCUGAUGACCCAGCGGCCCGCCCUGUCCGGCGACGCCGUGCAGAAGAUGCUGGGCCACUGCACCUUCGAGCCCGCCGAGCCC |
| | | AAGGCCGCCAAGAACACCUACACCGCCGAGCGGUUCAUCUGGCUGACCAAGCUGAACAACCUGCGGAUCCUGGAGCAGGGCUCCGAGCGGC |
| | | CCCUGACCGACACCGAGCGGGCCACCCUGAUGGACGAGCCCUACCGGAAGUCCAAGCUGACCUACGCCCAGGCCCGGAAGCUGCUGGGCCU |
| | | GGAGGACACCGCCUUCUUCAAGGGCCUGCGGUACGGCAAGGACAACGCCGAGGCCUCCACCCUGAUGGAGAUGAAGGCCUACCACGCCAUC |
| | | UCCCGGGCCCUGGAGAAGGAGGGCCUGAAGGACAAGAAGUCCCCCCUGAACCUGUCCUCCGAGCUGCAGGACGAGAUCGGCACCGCCUUCU |
| | | CCCUGUUCAAGACCGACGAGGACAUCACCGGCCGGCUGAAGGACCGGGUGCAGCCCGAGAUCCUGGAGGCCCUGCUGAAGCACAUCUCCUU |
| | | CGACAAGUUCGUGCAGAUCUCCCUGAAGGCCCUGCGGCGGAUCGUGCCCCUGAUGGAGCAGGGCAAGCGGUACGACGAGGCCUGCGCCGAG |
| | | AUCUACGGCGACCACUACGGCAAGAAGAACACCGAGGAGAAGAUCUACCUGCCCCCCAUCCCCGCCGACGAGAUCCGGAACCCCGUGGUGC |
| | | UGCGGGCCCUGUCCCAGGCCCGGAAGGUGAUCAACGGCGUGGUGCGGCGGUACGGCUCCCCCGCCCGGAUCCACAUCGAGACCGCCCGGGA |
| | | GGUGGGCAAGUCCUUCAAGGACCGGAAGGAGAUCGAGAAGCGGCAGGAGGAGAACCGGAAGGACCGGGAGAAGGCCGCCGCCAAGUUCCGG |
| | | GAGUACUUCCCCAACUUCGUGGGCGAGCCCAAGUCCAAGGACAUCCUGAAGCUGCGGCUGUACGAGCAGCAGCACGGCAAGUGCCUGUACU |
| | | CCGGCAAGGAGAUCAACCUGGUGCGGCUGAACGAGAAGGGCUACGUGGAGAUCGACCACGCCCUGCCCUUCUCCCGGACCUGGGACGACUC |
| | | CUUCAACAACAAGGUGCUGGUGCUGGGCUCCGAGAACCAGAACAAGGGCAACCAGACCCCCUACGAGUACUUCAACGGCAAGGACAACUCC |
| | | CGGGAGUGGCAGGAGUUCAAGGCCCGGGUGGAGACCUCCCGGUUCCCCCGGUCCAAGAAGCAGCGGAUCCUGCUGCAGAAGUUCGACGAGG |
| | | ACGGCUUCAAGGAGUGCAACCUGAACGACACCCGGUACGUGAACCGCUUCCUGUGCCAGUUCGUGGCCGACCACAUCCUGCUGACCGGCAA |
| | | GGGCAAGCGGCGGGUGUUCGCCUCCAACGGCCAGAUCACCAACCUGCUGCGGGGCUUCUGGGGCCUGCGGAAGGUGCGGGCCGAGAACGAC |
| | | CGGCACCACGCCCUGGACGCCGUGGUGGUGGCCUGCUCCACCGUGGCCAUGCAGCAGAAGAUCACCCGGUUCGUGCGGUACAAGGAGAUGA |
| | | ACGCCUUCGACGGCAAGACCAUCGACAAGGAGACCGGCAAGGUGCUGCACCAGAAGACCCACUUCCCCCAGCCCUGGGAGUUCUUCGCCCA |
| | | GGAGGUGAUGAUCCGGGUGUUCGGCAAGCCCGACGGCAAGCCCGAGUUCGAGGAGGCCGACACCCCCGAGAAGCUGCGGACCCUGCUGGCC |
| | | GAGAAGCUGUCCUCCCGGCCCGAGGCCGUGCACGAGUACGUGACCCCCCUGUUCGUGUCCCGGGCCCCCAACCGGAAGAUGUCCGGCGCCC |
| | | ACAAGGACACCCUGCGGUCCGCCAAGCGGUUCGUGAAGCACAACGAGAAGAUCUCCGUGAAGCGGGUGUGGCUGACCGAGAUCAAGCUGGC |
| | | CGACCUGGAGAACAUGGUGAACUACAAGAACGGCCGGGAGAUCGAGCUGUACGAGGCCCUGAAGGCCCGGCUGGAGGCCUACGGCGGCAAC |
| | | GCCAAGCAGGCCUUCGACCCCAAGGACAACCCCUUCUACAAGAAGGGCGGCCAGCUGGUGAAGGCCGUGCGGGUGGAGAAGACCCAGGAGU |
| | | CCGGCGUGCUGCUGAACAAGAAGAACGCCUACACCAUCGCCGACAACGGCGACAUGGUGCGGGUGGACGUGUUCUGCAAGGUGGACAAGAA |
| | | GGGCAAGAACCAGUACUUCAUCGUGCCCAUCUACGCCUGGCAGGUGGCCGAGAACAUCCUGCCCGACAUCGACUGCAAGGGCUACCGGAUC |
| | | GACGACUCCUACACCUUCUGCUUCUCCCUGCACAAGUACGACCUGAUCGCCUUCCAGAAGGACGAGAAGUCCAAGGUGGAGUUCGCCUACU |
| | | ACAUCAACUGCGACUCCUCCAACGGCCGGUUCUACCUGGCCUGGCACGACAAGGGCUCCAAGGAGCAGCAGUUCCGGAUCUCCACCCAGAA |
| | | CCUGGUGCUGAUCCAGAAGUACCAGGUGAACGAGCUGGGCAAGGAGAUCCGGCCCUGCCGGCUGAAGAAGCGGCCCCCCGUGCGGUCCGGA |
| | | AAGCGGACCGCCGACGGCUCCGGAGGAGGAAGCCCGAAGAAGAAGAGAAAGGUCAGCGAAAGCGCAACACCGGAAAGCGUCAGCGGAUGGA |
| | | GACUGUUCAAGAAGAUCAGCUAGCUAGCACCAGCCUCAAGAACACCCGAAUGGAGUCUCUAAGCUACAUAAUACCAACUUACACUUUACAA |
| | | AAUGUUGUCCCCCAAAAUGUAGCCAUUCGUAUCUGCUCCUAAUAAAAAGAAAGUUUCUUCACAUUCUCUCGAGAAAAAAAAAAAAUGGAAA |
| | | AAAAAAAAACGGAAAAAAAAAAAAGGUAAAAAAAAAAAAUAUAAAAAAAAAAAACAUAAAAAAAAAAAACGAAAAAAAAAAAACGUAAAAA |
| | | AAAAAAACUCAAAAAAAAAAAAGAUAAAAAAAAAAAACCUAAAAAAAAAAAAUGUAAAAAAAAAAAAGGGAAAAAAAAAAAACGCAAAAAA |
| | | AAAAAACACAAAAAAAAAAAAUGCAAAAAAAAAAAAUCGAAAAAAAAAAAAUCUAAAAAAAAAAAACGAAAAAAAAAAAACCCAAAAAAAA |
| | | AAAAGACAAAAAAAAAAAAUAGAAAAAAAAAAAAGUUAAAAAAAAAAAACUGAAAAAAAAAAAAUUUAAAAAAAAAAAAUCUAG |
| 59 | Cas9- | AUGGACAAGAAGUACUCCAUCGGCCUGGACAUCGGCACCAACUCCGUGGGCUGGGCCGUGAUCACCGACGAGUACAAGGUGCCCUCCAAGA |
| | Cas9 | AGUUCAAGGUGCUGGGCAACACCGACCGGCACUCCAUCAAGAAGAACCUGAUCGGCGCCCUGCUGUUCGACUCCGGCGAGACCGCCGAGGC |
| | fusion- | CACCCGGCUGAAGCGGACCGCCCGGCGGCGGUACACCCGGCGGAAGAACCGGAUCUGCUACCUGCAGGAGAUCUUCUCCAACGAGAUGGCC |
| | 51 | AAGGUGGACGACUCCUUCUUCCACCGGCUGGAGGAGUCCUUCCUGGUGGAGGAGGACAAGAAGCACGAGCGGCACCCCAUCUUCGGCAACA |
| | amino | UCGUGGACGAGGUGGCCUACCACGAGAAGUACCCCACCAUCUACCACCUGCGGAAGAAGCUGGUGGACUCCACCGACAAGGCCGACCUGCG |
| | acid | GCUGAUCUACCUGGCCCUGGCCCACAUGAUCAAGUUCCGGGGCCACUUCCUGAUCGAGGGCGACCUGAACCCCGACAACUCCGACGUGGAC |
| | residue | AAGCUGUUCAUCCAGCUGGUGCAGACCUACAACCAGCUGUUCGAGGAGAACCCCAUCAACGCCUCCGGCGUGGACGCCAAGGCCAUCCUGU |
| | linker | CCGCCCGGCUGUCCAAGUCCCGGCGGCUGGAGAACCUGAUCGCCCAGCUGCCCGGCGAGAAGAAGAACGGCCUGUUCGGCAACCUGAUCGC |
| | and | CCUGUCCCUGGGCCUGACCCCCAACUUCAAGUCCAACUUCGACCUGGCCGAGGACGCCAAGCUGCAGCUGUCCAAGGACACCUACGACGAC |
| | HiBit | GACCUGGACAACCUGCUGGCCCAGAUCGGCGACCAGUACGCCGACCUGUUCCUGGCCGCCAAGAACCUGUCCGACGCCAUCCUGCUGUCCG |
| | tag | ACAUCCUGCGGGUGAACACCGAGAUCACCAAGGCCCCCCUGUCCGCCUCCAUGAUCAAGCGGUACGACGAGCACCACCAGGACCUGACCCU |
| | (mRNA | GCUGAAGGCCCUGGUGCGGCAGCAGCUGCCCGAGAAGUACAAGGAGAUCUUCUUCGACCAGUCCAAGAACGGCUACGCCGGCUACAUCGAC |
| | Q)-ORF | GGCGGCGCCUCCCAGGAGGAGUUCUACAAGUUCAUCAAGCCCAUCCUGGAGAAGAUGGACGGCACCGAGGAGCUGCUGGUGAAGCUGAACC |
| | sequence | GGGAGGACCUGCUGCGGAAGCAGCGGACCUUCGACAACGGCUCCAUCCCCCACCAGAUCCACCUGGGCGAGCUGCACGCCAUCCUGCGGCG |
| | | GCAGGAGGACUUCUACCCCUUCCUGAAGGACAACCGGGAGAAGAUCGAGAAGAUCCUGACCUUCCGGAUCCCCUACUACGUGGGCCCCCUG |
| | | GCCCGGGGCAACUCCCGGUUCGCCUGGAUGACCCGGAAGUCCGAGGAGACCAUCACCCCCUGGAACUUCGAGGAGGUGGUGGACAAGGGCG |
| | | CCUCCGCCCAGUCCUUCAUCGAGCGGAUGACCAACUUCGACAAGAACCUGCCCAACGAGAAGGUGCUGCCCAAGCACUCCCUGCUGUACGA |
| | | GUACUUCACCGUGUACAACGAGCUGACCAAGGUGAAGUACGUGACCGAGGGCAUGCGGAAGCCCGCCUUCCUGUCCGGCGAGCAGAAGAAG |
| | | GCCAUCGUGGACCUGCUGUUCAAGACCAACCGGAAGGUGACCGUGAAGCAGCUGAAGGAGGACUACUUCAAGAAGAUCGAGUGCUUCGACU |
| | | CCGUGGAGAUCUCCGGCGUGGAGGACCGGUUCAACGCCUCCCUGGGCACCUACCACGACCUGCUGAAGAUCAUCAAGGACAAGGACUUCCU |
| | | GGACAACGAGGAGAACGAGGACAUCCUGGAGGACAUCGUGCUGACCCUGACCCUGUUCGAGGACCGGGAGAUGAUCGAGGAGCGGCUGAAG |
| | | ACCUACGCCCACCUGUUCGACGACAAGGUGAUGAAGCAGCUGAAGCGGCGGCGGUACACCGGCUGGGGCCGGCUGUCCCGGAAGCUGAUCA |
| | | ACGGCAUCCGGGACAAGCAGUCCGGCAAGACCAUCCUGGACUUCCUGAAGUCCGACGGCUUCGCCAACCGGAACUUCAUGCAGCUGAUCCA |
| | | CGACGACUCCCUGACCUUCAAGGAGGACAUCCAGAAGGCCCAGGUGUCCGGCCAGGGCGACUCCCUGCACGAGCACAUCGCCAACCUGGCC |
| | | GGCUCCCCCGCCAUCAAGAAGGGCAUCCUGCAGACCGUGAAGGUGGUGGACGAGCUGGUGAAGGUGAUGGGCCGGCACAAGCCCGAGAACA |
| | | UCGUGAUCGAGAUGGCCCGGGAGAACCAGACCACCCAGAAGGGCCAGAAGAACUCCCGGGAGCGGAUGAAGCGGAUCGAGGAGGGCAUCAA |
| | | GGAGCUGGGCUCCCAGAUCCUGAAGGAGCACCCCGUGGAGAACACCCAGCUGCAGAACGAGAAGCUGUACCUGUACUACCUGCAGAACGGC |
| | | CGGGACAUGUACGUGGACCAGGAGCUGGACAUCAACCGGCUGUCCGACUACGACGUGGACCACAUCGUGCCCCAGUCCUUCCUGAAGGACG |
| | | ACUCCAUCGACAACAAGGUGCUGACCCGGUCCGACAAGAACCGGGGCAAGUCCGACAACGUGCCCUCCGAGGAGGUGGUGAAGAAGAUGAA |
| | | GAACUACUGGCGGCAGCUGCUGAACGCCAAGCUGAUCACCCAGCGGAAGUUCGACAACCUGACCAAGGCCGAGCGGGGCGGCCUGUCCGAG |
| | | CUGGACAAGGCCGGCUUCAUCAAGCGGCAGCUGGUGGAGACCCGGCAGAUCACCAAGCACGUGGCCCAGAUCCUGGACUCCCGGAUGAACA |
| | | CCAAGUACGACGAGAACGACAAGCUGAUCCGGGAGGUGAAGGUGAUCACCCUGAAGUCCAAGCUGGUGUCCGACUUCCGGAAGGACUUCCA |
| | | GUUCUACAAGGUGCGGGAGAUCAACAACUACCACCACGCCCACGACGCCUACCUGAACGCCGUGGUGGGCACCGCCCUGAUCAAGAAGUAC |
| | | CCCAAGCUGGAGUCCGAGUUCGUGUACGGCGACUACAAGGUGUACGACGUGCGGAAGAUGAUCGCCAAGUCCGAGCAGGAGAUCGGCAAGG |
| | | CCACCGCCAAGUACUUCUUCUACUCCAACAUCAUGAACUUCUUCAAGACCGAGAUCACCCUGGCCAACGGCGAGAUCCGGAAGCGGCCCCU |
| | | GAUCGAGACCAACGGCGAGACCGGCGAGAUCGUGUGGGACAAGGGCCGGGACUUCGCCACCGUGCGGAAGGUGCUGUCCAUGCCCCAGGUG |
| | | AACAUCGUGAAGAAGACCGAGGUGCAGACCGGCGGCUUCUCCAAGGAGUCCAUCCUGCCCAAGCGGAACUCCGACAAGCUGAUCGCCCGGA |
| | | AGAAGGACUGGGACCCCAAGAAGUACGGCGGCUUCGACUCCCCCACCGUGGCCUACUCCGUGCUGGUGGUGGCCAAGGUGGAGAAGGGCAA |
| | | GUCCAAGAAGCUGAAGUCCGUGAAGGAGCUGCUGGGCAUCACCAUCAUGGAGCGGUCCUCCUUCGAGAAGAACCCCAUCGACUUCCUGGAG |
| | | GCCAAGGGCUACAAGGAGGUGAAGAAGGACCUGAUCAUCAAGCUGCCCAAGUACUCCCUGUUCGAGCUGGAGAACGGCCGGAAGCGGAUGC |
| | | UGGCCUCCGCCGGCGAGCUGCAGAAGGGCAACGAGCUGGCCCUGCCCUCCAAGUACGUGAACUUCCUGUACCUGGCCUCCCACUACGAGAA |
| | | GCUGAAGGGCUCCCCCGAGGACAACGAGCAGAAGCAGCUGUUCGUGGAGCAGCACAAGCACUACCUGGACGAGAUCAUCGAGCAGAUCUCC |
| | | GAGUUCUCCAAGCGGGUGAUCCUGGCCGACGCCAACCUGGACAAGGUGCUGUCCGCCUACAACAAGCACCGGGACAAGCCCAUCCGGGAGC |
| | | AGGCCGAGAACAUCAUCCACCUGUUCACCCUGACCAACCUGGGCGCCCCCGCCGCCUUCAAGUACUUCGACACCACCAUCGACAAGAAGCG |
| | | GUACACCUCCACCAAGGAGGUGCUGGACGCCACCCUGAUCCACCAGUCCAUCACCGGCCUGUACGAGACCCGGAUCGACCUGUCCCAGCUG |
| | | GGCGGCGACGGCGCCCCCGAGUCCGCCACCGAGUCCGGCGGCACCUCCACCGAGUCCGAGGGCUCCGCCGGCACCUCCACCGAGUCCGAGG |
| | | GCUCCGCCGGCUCCGCCGGCUCCACCUCCACCGAGGAGGGCACCUCCACCGAGUCCGAGGGCUCCUCCUCCGGUGCCGCCUUCAAGCCCAA |
| | | CCCCAUCAACUACAUCCUGGGCCUGGACAUCGGCAUCGCCUCCGUGGGCUGGGCCAUGGUGGAGAUCGACGAGGAGGAGAACCCCAUCCGG |
| | | CUGAUCGACCUGGGCGUGCGGGUGUUCGAGCGGGCCGAGGUGCCCAAGACCGGCGACUCCCUGGCCAUGGCCCGGCGGCUGGCCCGGUCCG |
| | | UGCGGCGGCUGACCCGGCGGCGGGCCCACCGGCUGCUGCGGGCCCGGCGGCUGCUGAAGCGGGAGGGCGUGCUGCAGGCCGCCGACUUCGA |
| | | CGAGAACGGCCUGAUCAAGUCCCUGCCCAACACCCCCUGGCAGCUGCGGGCCGCCGCCCUGGACCGGAAGCUGACCCCCCUGGAGUGGUCC |
| | | GCCGUGCUGCUGCACCUGAUCAAGCACCGGGGCUACCUGUCCCAGCGGAAGAACGAGGGCGAGACCGCCGACAAGGAGCUGGGCGCCCUGC |
| | | UGAAGGGCGUGGCCAACAACGCCCACGCCCUGCAGACCGGCGACUUCCGGACCCCCGCCGAGCUGGCCCUGAACAAGUUCGAGAAGGAGUC |
| | | CGGCCACAUCCGGAACCAGCGGGGCGACUACUCCCACACCUUCUCCCGGAAGGACCUGCAGGCCGAGCUGAUCCUGCUGUUCGAGAAGCAG |
| | | AAGGAGUUCGGCAACCCCCACGUGUCCGGCGGCCUGAAGGAGGGCAUCGAGACCCUGCUGAUGACCCAGCGGCCCGCCCUGUCCGGCGACG |
| | | CCGUGCAGAAGAUGCUGGGCCACUGCACCUUCGAGCCCGCCGAGCCCAAGGCCGCCAAGAACACCUACACCGCCGAGCGGUUCAUCUGGCU |
| | | GACCAAGCUGAACAACCUGCGGAUCCUGGAGCAGGGCUCCGAGCGGCCCCUGACCGACACCGAGCGGGCCACCCUGAUGGACGAGCCCUAC |
| | | CGGAAGUCCAAGCUGACCUACGCCCAGGCCCGGAAGCUGCUGGGCCUGGAGGACACCGCCUUCUUCAAGGGCCUGCGGUACGGCAAGGACA |
| | | ACGCCGAGGCCUCCACCCUGAUGGAGAUGAAGGCCUACCACGCCAUCUCCCGGGCCCUGGAGAAGGAGGGCCUGAAGGACAAGAAGUCCCC |
| | | CCUGAACCUGUCCUCCGAGCUGCAGGACGAGAUCGGCACCGCCUUCUCCCUGUUCAAGACCGACGAGGACAUCACCGGCCGGCUGAAGGAC |
| | | CGGGUGCAGCCCGAGAUCCUGGAGGCCCUGCUGAAGCACAUCUCCUUCGACAAGUUCGUGCAGAUCUCCCUGAAGGCCCUGCGGCGGAUCG |
| | | UGCCCCUGAUGGAGCAGGGCAAGCGGUACGACGAGGCCUGCGCCGAGAUCUACGGCGACCACUACGGCAAGAAGAACACCGAGGAGAAGAU |
| | | CUACCUGCCCCCCAUCCCCGCCGACGAGAUCCGGAACCCCGUGGUGCUGCGGGCCCUGUCCCAGGCCCGGAAGGUGAUCAACGGCGUGGUG |
| | | CGGCGGUACGGCUCCCCCGCCCGGAUCCACAUCGAGACCGCCCGGGAGGUGGGCAAGUCCUUCAAGGACCGGAAGGAGAUCGAGAAGCGGC |
| | | AGGAGGAGAACCGGAAGGACCGGGAGAAGGCCGCCGCCAAGUUCCGGGAGUACUUCCCCAACUUCGUGGGCGAGCCCAAGUCCAAGGACAU |
| | | CCUGAAGCUGCGGCUGUACGAGCAGCAGCACGGCAAGUGCCUGUACUCCGGCAAGGAGAUCAACCUGGUGCGGCUGAACGAGAAGGGCUAC |
| | | GUGGAGAUCGACCACGCCCUGCCCUUCUCCCGGACCUGGGACGACUCCUUCAACAACAAGGUGCUGGUGCUGGGCUCCGAGAACCAGAACA |
| | | AGGGCAACCAGACCCCCUACGAGUACUUCAACGGCAAGGACAACUCCCGGGAGUGGCAGGAGUUCAAGGCCCGGGUGGAGACCUCCCGGUU |
| | | CCCCCGGUCCAAGAAGCAGCGGAUCCUGCUGCAGAAGUUCGACGAGGACGGCUUCAAGGAGUGCAACCUGAACGACACCCGGUACGUGAAC |
| | | CGCUUCCUGUGCCAGUUCGUGGCCGACCACAUCCUGCUGACCGGCAAGGGCAAGCGGCGGGUGUUCGCCUCCAACGGCCAGAUCACCAACC |
| | | UGCUGCGGGGCUUCUGGGGCCUGCGGAAGGUGCGGGCCGAGAACGACCGGCACCACGCCCUGGACGCCGUGGUGGUGGCCUGCUCCACCGU |
| | | GGCCAUGCAGCAGAAGAUCACCCGGUUCGUGCGGUACAAGGAGAUGAACGCCUUCGACGGCAAGACCAUCGACAAGGAGACCGGCAAGGUG |
| | | CUGCACCAGAAGACCCACUUCCCCCAGCCCUGGGAGUUCUUCGCCCAGGAGGUGAUGAUCCGGGUGUUCGGCAAGCCCGACGGCAAGCCCG |
| | | AGUUCGAGGAGGCCGACACCCCCGAGAAGCUGCGGACCCUGCUGGCCGAGAAGCUGUCCUCCCGGCCCGAGGCCGUGCACGAGUACGUGAC |
| | | CCCCCUGUUCGUGUCCCGGGCCCCCAACCGGAAGAUGUCCGGCGCCCACAAGGACACCCUGCGGUCCGCCAAGCGGUUCGUGAAGCACAAC |
| | | GAGAAGAUCUCCGUGAAGCGGGUGUGGCUGACCGAGAUCAAGCUGGCCGACCUGGAGAACAUGGUGAACUACAAGAACGGCCGGGAGAUCG |
| | | AGCUGUACGAGGCCCUGAAGGCCCGGCUGGAGGCCUACGGCGGCAACGCCAAGCAGGCCUUCGACCCCAAGGACAACCCCUUCUACAAGAA |
| | | GGGCGGCCAGCUGGUGAAGGCCGUGCGGGUGGAGAAGACCCAGGAGUCCGGCGUGCUGCUGAACAAGAAGAACGCCUACACCAUCGCCGAC |
| | | AACGGCGACAUGGUGCGGGUGGACGUGUUCUGCAAGGUGGACAAGAAGGGCAAGAACCAGUACUUCAUCGUGCCCAUCUACGCCUGGCAGG |
| | | UGGCCGAGAACAUCCUGCCCGACAUCGACUGCAAGGGCUACCGGAUCGACGACUCCUACACCUUCUGCUUCUCCCUGCACAAGUACGACCU |
| | | GAUCGCCUUCCAGAAGGACGAGAAGUCCAAGGUGGAGUUCGCCUACUACAUCAACUGCGACUCCUCCAACGGCCGGUUCUACCUGGCCUGG |
| | | CACGACAAGGGCUCCAAGGAGCAGCAGUUCCGGAUCUCCACCCAGAACCUGGUGCUGAUCCAGAAGUACCAGGUGAACGAGCUGGGCAAGG |
| | | AGAUCCGGCCCUGCCGGCUGAAGAAGCGGCCCCCCGUGCGGUCCGGAAAGCGGACCGCCGACGGCUCCGGAGGAGGAAGCCCGAAGAAGAA |
| | | GAGAAAGGUCAGCGAAAGCGCAACACCGGAAAGCGUCAGCGGAUGGAGACUGUUCAAGAAGAUCAGCUAG |
| 60 | Cas9- | MDKKYSIGLDIGTNSVGWAVITDEYKVPSKKFKVLGNTDRHSIKKNLIGALLFDSGETAEATRLKRTARRRYTRRKNRICYLQEIFSNEMA |
| | Cas9 | KVDDSFFHRLEESFLVEEDKKHERHPIFGNIVDEVAYHEKYPTIYHLRKKLVDSTDKADLRLIYLALAHMIKFRGHFLIEGDLNPDNSDVD |
| | fusion- | KLFIQLVQTYNQLFEENPINASGVDAKAILSARLSKSRRLENLIAQLPGEKKNGLFGNLIALSLGLTPNFKSNFDLAEDAKLQLSKDTYDD |
| | 51 | DLDNLLAQIGDQYADLFLAAKNLSDAILLSDILRVNTEITKAPLSASMIKRYDEHHQDLTLLKALVRQQLPEKYKEIFFDQSKNGYAGYID |
| | amino | GGASQEEFYKFIKPILEKMDGTEELLVKLNREDLLRKQRTFDNGSIPHQIHLGELHAILRRQEDFYPFLKDNREKIEKILTFRIPYYVGPL |
| | acid | ARGNSRFAWMTRKSEETITPWNFEEVVDKGASAQSFIERMTNFDKNLPNEKVLPKHSLLYEYFTVYNELTKVKYVTEGMRKPAFLSGEQKK |
| | residue | AIVDLLFKTNRKVTVKQLKEDYFKKIECFDSVEISGVEDRFNASLGTYHDLLKIIKDKDFLDNEENEDILEDIVLTLTLFEDREMIEERLK |
| | linker | TYAHLFDDKVMKQLKRRRYTGWGRLSRKLINGIRDKQSGKTILDFLKSDGFANRNFMQLIHDDSLTFKEDIQKAQVSGQGDSLHEHIANLA |
| | and | GSPAIKKGILQTVKVVDELVKVMGRHKPENIVIEMARENQTTQKGQKNSRERMKRIEEGIKELGSQILKEHPVENTQLQNEKLYLYYLQNG |
| | HiBit | RDMYVDQELDINRLSDYDVDHIVPQSFLKDDSIDNKVLTRSDKNRGKSDNVPSEEVVKKMKNYWRQLLNAKLITQRKFDNLTKAERGGLSE |
| | tag | LDKAGFIKRQLVETRQITKHVAQILDSRMNTKYDENDKLIREVKVITLKSKLVSDFRKDFQFYKVREINNYHHAHDAYLNAVVGTALIKKY |
| | (mRNA | PKLESEFVYGDYKVYDVRKMIAKSEQEIGKATAKYFFYSNIMNFFKTEITLANGEIRKRPLIETNGETGEIVWDKGRDFATVRKVLSMPQV |
| | Q)- | NIVKKTEVQTGGFSKESILPKRNSDKLIARKKDWDPKKYGGFDSPTVAYSVLVVAKVEKGKSKKLKSVKELLGITIMERSSFEKNPIDFLE |
| | amino | AKGYKEVKKDLIIKLPKYSLFELENGRKRMLASAGELQKGNELALPSKYVNFLYLASHYEKLKGSPEDNEQKQLFVEQHKHYLDEIIEQIS |
| | acid | EFSKRVILADANLDKVLSAYNKHRDKPIREQAENIIHLFTLTNLGAPAAFKYFDTTIDKKRYTSTKEVLDATLIHQSITGLYETRIDLSQL |
| | sequence | GGDGAPESATESGGTSTESEGSAGTSTESEGSAGSAGSTSTEEGTSTESEGSSSGAAFKPNPINYILGLDIGIASVGWAMVEIDEEENPIR |
| | | LIDLGVRVFERAEVPKTGDSLAMARRLARSVRRLTRRRAHRLLRARRLLKREGVLQAADFDENGLIKSLPNTPWQLRAAALDRKLTPLEWS |
| | | AVLLHLIKHRGYLSQRKNEGETADKELGALLKGVANNAHALQTGDFRTPAELALNKFEKESGHIRNQRGDYSHTFSRKDLQAELILLFEKQ |
| | | KEFGNPHVSGGLKEGIETLLMTQRPALSGDAVQKMLGHCTFEPAEPKAAKNTYTAERFIWLTKLNNLRILEQGSERPLTDTERATLMDEPY |
| | | RKSKLTYAQARKLLGLEDTAFFKGLRYGKDNAEASTLMEMKAYHAISRALEKEGLKDKKSPLNLSSELQDEIGTAFSLFKTDEDITGRLKD |
| | | RVQPEILEALLKHISFDKFVQISLKALRRIVPLMEQGKRYDEACAEIYGDHYGKKNTEEKIYLPPIPADEIRNPVVLRALSQARKVINGVV |
| | | RRYGSPARIHIETAREVGKSFKDRKEIEKRQEENRKDREKAAAKFREYFPNFVGEPKSKDILKLRLYEQQHGKCLYSGKEINLVRLNEKGY |
| | | VEIDHALPFSRTWDDSFNNKVLVLGSENQNKGNQTPYEYFNGKDNSREWQEFKARVETSRFPRSKKQRILLQKFDEDGFKECNLNDTRYVN |
| | | RFLCQFVADHILLTGKGKRRVFASNGQITNLLRGFWGLRKVRAENDRHHALDAVVVACSTVAMQQKITRFVRYKEMNAFDGKTIDKETGKV |
| | | LHQKTHFPQPWEFFAQEVMIRVFGKPDGKPEFEEADTPEKLRTLLAEKLSSRPEAVHEYVTPLFVSRAPNRKMSGAHKDTLRSAKRFVKHN |
| | | EKISVKRVWLTEIKLADLENMVNYKNGREIELYEALKARLEAYGGNAKQAFDPKDNPFYKKGGQLVKAVRVEKTQESGVLLNKKNAYTIAD |
| | | NGDMVRVDVFCKVDKKGKNQYFIVPIYAWQVAENILPDIDCKGYRIDDSYTFCFSLHKYDLIAFQKDEKSKVEFAYYINCDSSNGRFYLAW |
| | | HDKGSKEQQFRISTQNLVLIQKYQVNELGKEIRPCRLKKRPPVRSGKRTADGSGGGSPKKKRKVSESATPESVSGWRLFKKIS* |
| 61 | Cas9- | AUGGACAAGAAGUACUCCAUCGGCCUGGACAUCGGCACCAACUCCGUGGGCUGGGCCGUGAUCACCGACGAGUACAAGGUGCCCUCCAAGA |
| | Cas9 | AGUUCAAGGUGCUGGGCAACACCGACCGGCACUCCAUCAAGAAGAACCUGAUCGGCGCCCUGCUGUUCGACUCCGGCGAGACCGCCGAGGC |
| | fusion- | CACCCGGCUGAAGCGGACCGCCCGGCGGCGGUACACCCGGCGGAAGAACCGGAUCUGCUACCUGCAGGAGAUCUUCUCCAACGAGAUGGCC |
| | 51 | AAGGUGGACGACUCCUUCUUCCACCGGCUGGAGGAGUCCUUCCUGGUGGAGGAGGACAAGAAGCACGAGCGGCACCCCAUCUUCGGCAACA |
| | amino | UCGUGGACGAGGUGGCCUACCACGAGAAGUACCCCACCAUCUACCACCUGCGGAAGAAGCUGGUGGACUCCACCGACAAGGCCGACCUGCG |
| | acid | GCUGAUCUACCUGGCCCUGGCCCACAUGAUCAAGUUCCGGGGCCACUUCCUGAUCGAGGGCGACCUGAACCCCGACAACUCCGACGUGGAC |
| | residual | AAGCUGUUCAUCCAGCUGGUGCAGACCUACAACCAGCUGUUCGAGGAGAACCCCAUCAACGCCUCCGGCGUGGACGCCAAGGCCAUCCUGU |
| | linker | CCGCCCGGCUGUCCAAGUCCCGGCGGCUGGAGAACCUGAUCGCCCAGCUGCCCGGCGAGAAGAAGAACGGCCUGUUCGGCAACCUGAUCGC |
| | (mRNA | CCUGUCCCUGGGCCUGACCCCCAACUUCAAGUCCAACUUCGACCUGGCCGAGGACGCCAAGCUGCAGCUGUCCAAGGACACCUACGACGAC |
| | Q)- | GACCUGGACAACCUGCUGGCCCAGAUCGGCGACCAGUACGCCGACCUGUUCCUGGCCGCCAAGAACCUGUCCGACGCCAUCCUGCUGUCCG |
| | mRNA | ACAUCCUGCGGGUGAACACCGAGAUCACCAAGGCCCCCCUGUCCGCCUCCAUGAUCAAGCGGUACGACGAGCACCACCAGGACCUGACCCU |
| | sequence | GCUGAAGGCCCUGGUGCGGCAGCAGCUGCCCGAGAAGUACAAGGAGAUCUUCUUCGACCAGUCCAAGAACGGCUACGCCGGCUACAUCGAC |
| | | GGCGGCGCCUCCCAGGAGGAGUUCUACAAGUUCAUCAAGCCCAUCCUGGAGAAGAUGGACGGCACCGAGGAGCUGCUGGUGAAGCUGAACC |
| | | GGGAGGACCUGCUGCGGAAGCAGCGGACCUUCGACAACGGCUCCAUCCCCCACCAGAUCCACCUGGGCGAGCUGCACGCCAUCCUGCGGCG |
| | | GCAGGAGGACUUCUACCCCUUCCUGAAGGACAACCGGGAGAAGAUCGAGAAGAUCCUGACCUUCCGGAUCCCCUACUACGUGGGCCCCCUG |
| | | GCCCGGGGCAACUCCCGGUUCGCCUGGAUGACCCGGAAGUCCGAGGAGACCAUCACCCCCUGGAACUUCGAGGAGGUGGUGGACAAGGGCG |
| | | CCUCCGCCCAGUCCUUCAUCGAGCGGAUGACCAACUUCGACAAGAACCUGCCCAACGAGAAGGUGCUGCCCAAGCACUCCCUGCUGUACGA |
| | | GUACUUCACCGUGUACAACGAGCUGACCAAGGUGAAGUACGUGACCGAGGGCAUGCGGAAGCCCGCCUUCCUGUCCGGCGAGCAGAAGAAG |
| | | GCCAUCGUGGACCUGCUGUUCAAGACCAACCGGAAGGUGACCGUGAAGCAGCUGAAGGAGGACUACUUCAAGAAGAUCGAGUGCUUCGACU |
| | | CCGUGGAGAUCUCCGGCGUGGAGGACCGGUUCAACGCCUCCCUGGGCACCUACCACGACCUGCUGAAGAUCAUCAAGGACAAGGACUUCCU |
| | | GGACAACGAGGAGAACGAGGACAUCCUGGAGGACAUCGUGCUGACCCUGACCCUGUUCGAGGACCGGGAGAUGAUCGAGGAGCGGCUGAAG |
| | | ACCUACGCCCACCUGUUCGACGACAAGGUGAUGAAGCAGCUGAAGCGGCGGCGGUACACCGGCUGGGGCCGGCUGUCCCGGAAGCUGAUCA |
| | | ACGGCAUCCGGGACAAGCAGUCCGGCAAGACCAUCCUGGACUUCCUGAAGUCCGACGGCUUCGCCAACCGGAACUUCAUGCAGCUGAUCCA |
| | | CGACGACUCCCUGACCUUCAAGGAGGACAUCCAGAAGGCCCAGGUGUCCGGCCAGGGCGACUCCCUGCACGAGCACAUCGCCAACCUGGCC |
| | | GGCUCCCCCGCCAUCAAGAAGGGCAUCCUGCAGACCGUGAAGGUGGUGGACGAGCUGGUGAAGGUGAUGGGCCGGCACAAGCCCGAGAACA |
| | | UCGUGAUCGAGAUGGCCCGGGAGAACCAGACCACCCAGAAGGGCCAGAAGAACUCCCGGGAGCGGAUGAAGCGGAUCGAGGAGGGCAUCAA |
| | | GGAGCUGGGCUCCCAGAUCCUGAAGGAGCACCCCGUGGAGAACACCCAGCUGCAGAACGAGAAGCUGUACCUGUACUACCUGCAGAACGGC |
| | | CGGGACAUGUACGUGGACCAGGAGCUGGACAUCAACCGGCUGUCCGACUACGACGUGGACCACAUCGUGCCCCAGUCCUUCCUGAAGGACG |
| | | ACUCCAUCGACAACAAGGUGCUGACCCGGUCCGACAAGAACCGGGGCAAGUCCGACAACGUGCCCUCCGAGGAGGUGGUGAAGAAGAUGAA |
| | | GAACUACUGGCGGCAGCUGCUGAACGCCAAGCUGAUCACCCAGCGGAAGUUCGACAACCUGACCAAGGCCGAGCGGGGCGGCCUGUCCGAG |
| | | CUGGACAAGGCCGGCUUCAUCAAGCGGCAGCUGGUGGAGACCCGGCAGAUCACCAAGCACGUGGCCCAGAUCCUGGACUCCCGGAUGAACA |
| | | CCAAGUACGACGAGAACGACAAGCUGAUCCGGGAGGUGAAGGUGAUCACCCUGAAGUCCAAGCUGGUGUCCGACUUCCGGAAGGACUUCCA |
| | | GUUCUACAAGGUGCGGGAGAUCAACAACUACCACCACGCCCACGACGCCUACCUGAACGCCGUGGUGGGCACCGCCCUGAUCAAGAAGUAC |
| | | CCCAAGCUGGAGUCCGAGUUCGUGUACGGCGACUACAAGGUGUACGACGUGCGGAAGAUGAUCGCCAAGUCCGAGCAGGAGAUCGGCAAGG |
| | | CCACCGCCAAGUACUUCUUCUACUCCAACAUCAUGAACUUCUUCAAGACCGAGAUCACCCUGGCCAACGGCGAGAUCCGGAAGCGGCCCCU |
| | | GAUCGAGACCAACGGCGAGACCGGCGAGAUCGUGUGGGACAAGGGCCGGGACUUCGCCACCGUGCGGAAGGUGCUGUCCAUGCCCCAGGUG |
| | | AACAUCGUGAAGAAGACCGAGGUGCAGACCGGCGGCUUCUCCAAGGAGUCCAUCCUGCCCAAGCGGAACUCCGACAAGCUGAUCGCCCGGA |
| | | AGAAGGACUGGGACCCCAAGAAGUACGGCGGCUUCGACUCCCCCACCGUGGCCUACUCCGUGCUGGUGGUGGCCAAGGUGGAGAAGGGCAA |
| | | GUCCAAGAAGCUGAAGUCCGUGAAGGAGCUGCUGGGCAUCACCAUCAUGGAGCGGUCCUCCUUCGAGAAGAACCCCAUCGACUUCCUGGAG |
| | | GCCAAGGGCUACAAGGAGGUGAAGAAGGACCUGAUCAUCAAGCUGCCCAAGUACUCCCUGUUCGAGCUGGAGAACGGCCGGAAGCGGAUGC |
| | | UGGCCUCCGCCGGCGAGCUGCAGAAGGGCAACGAGCUGGCCCUGCCCUCCAAGUACGUGAACUUCCUGUACCUGGCCUCCCACUACGAGAA |
| | | GCUGAAGGGCUCCCCCGAGGACAACGAGCAGAAGCAGCUGUUCGUGGAGCAGCACAAGCACUACCUGGACGAGAUCAUCGAGCAGAUCUCC |
| | | GAGUUCUCCAAGCGGGUGAUCCUGGCCGACGCCAACCUGGACAAGGUGCUGUCCGCCUACAACAAGCACCGGGACAAGCCCAUCCGGGAGC |
| | | AGGCCGAGAACAUCAUCCACCUGUUCACCCUGACCAACCUGGGCGCCCCCGCCGCCUUCAAGUACUUCGACACCACCAUCGACAAGAAGCG |
| | | GUACACCUCCACCAAGGAGGUGCUGGACGCCACCCUGAUCCACCAGUCCAUCACCGGCCUGUACGAGACCCGGAUCGACCUGUCCCAGCUG |
| | | GGCGGCGACGGCGCCCCCGAGUCCGCCACCGAGUCCGGCGGCACCUCCACCGAGUCCGAGGGCUCCGCCGGCACCUCCACCGAGUCCGAGG |
| | | GCUCCGCCGGCUCCGCCGGCUCCACCUCCACCGAGGAGGGCACCUCCACCGAGUCCGAGGGCUCCUCCUCCGGUGCCGCCUUCAAGCCCAA |
| | | CCCCAUCAACUACAUCCUGGGCCUGGACAUCGGCAUCGCCUCCGUGGGCUGGGCCAUGGUGGAGAUCGACGAGGAGGAGAACCCCAUCCGG |
| | | CUGAUCGACCUGGGCGUGCGGGUGUUCGAGCGGGCCGAGGUGCCCAAGACCGGCGACUCCCUGGCCAUGGCCCGGCGGCUGGCCCGGUCCG |
| | | UGCGGCGGCUGACCCGGCGGCGGGCCCACCGGCUGCUGCGGGCCCGGCGGCUGCUGAAGCGGGAGGGCGUGCUGCAGGCCGCCGACUUCGA |
| | | CGAGAACGGCCUGAUCAAGUCCCUGCCCAACACCCCCUGGCAGCUGCGGGCCGCCGCCCUGGACCGGAAGCUGACCCCCCUGGAGUGGUCC |
| | | GCCGUGCUGCUGCACCUGAUCAAGCACCGGGGCUACCUGUCCCAGCGGAAGAACGAGGGCGAGACCGCCGACAAGGAGCUGGGCGCCCUGC |
| | | UGAAGGGCGUGGCCAACAACGCCCACGCCCUGCAGACCGGCGACUUCCGGACCCCCGCCGAGCUGGCCCUGAACAAGUUCGAGAAGGAGUC |
| | | CGGCCACAUCCGGAACCAGCGGGGCGACUACUCCCACACCUUCUCCCGGAAGGACCUGCAGGCCGAGCUGAUCCUGCUGUUCGAGAAGCAG |
| | | AAGGAGUUCGGCAACCCCCACGUGUCCGGCGGCCUGAAGGAGGGCAUCGAGACCCUGCUGAUGACCCAGCGGCCCGCCCUGUCCGGCGACG |
| | | CCGUGCAGAAGAUGCUGGGCCACUGCACCUUCGAGCCCGCCGAGCCCAAGGCCGCCAAGAACACCUACACCGCCGAGCGGUUCAUCUGGCU |
| | | GACCAAGCUGAACAACCUGCGGAUCCUGGAGCAGGGCUCCGAGCGGCCCCUGACCGACACCGAGCGGGCCACCCUGAUGGACGAGCCCUAC |
| | | CGGAAGUCCAAGCUGACCUACGCCCAGGCCCGGAAGCUGCUGGGCCUGGAGGACACCGCCUUCUUCAAGGGCCUGCGGUACGGCAAGGACA |
| | | ACGCCGAGGCCUCCACCCUGAUGGAGAUGAAGGCCUACCACGCCAUCUCCCGGGCCCUGGAGAAGGAGGGCCUGAAGGACAAGAAGUCCCC |
| | | CCUGAACCUGUCCUCCGAGCUGCAGGACGAGAUCGGCACCGCCUUCUCCCUGUUCAAGACCGACGAGGACAUCACCGGCCGGCUGAAGGAC |
| | | CGGGUGCAGCCCGAGAUCCUGGAGGCCCUGCUGAAGCACAUCUCCUUCGACAAGUUCGUGCAGAUCUCCCUGAAGGCCCUGCGGCGGAUCG |
| | | UGCCCCUGAUGGAGCAGGGCAAGCGGUACGACGAGGCCUGCGCCGAGAUCUACGGCGACCACUACGGCAAGAAGAACACCGAGGAGAAGAU |
| | | CUACCUGCCCCCCAUCCCCGCCGACGAGAUCCGGAACCCCGUGGUGCUGCGGGCCCUGUCCCAGGCCCGGAAGGUGAUCAACGGCGUGGUG |
| | | CGGCGGUACGGCUCCCCCGCCCGGAUCCACAUCGAGACCGCCCGGGAGGUGGGCAAGUCCUUCAAGGACCGGAAGGAGAUCGAGAAGCGGC |
| | | AGGAGGAGAACCGGAAGGACCGGGAGAAGGCCGCCGCCAAGUUCCGGGAGUACUUCCCCAACUUCGUGGGCGAGCCCAAGUCCAAGGACAU |
| | | CCUGAAGCUGCGGCUGUACGAGCAGCAGCACGGCAAGUGCCUGUACUCCGGCAAGGAGAUCAACCUGGUGCGGCUGAACGAGAAGGGCUAC |
| | | GUGGAGAUCGACCACGCCCUGCCCUUCUCCCGGACCUGGGACGACUCCUUCAACAACAAGGUGCUGGUGCUGGGCUCCGAGAACCAGAACA |
| | | AGGGCAACCAGACCCCCUACGAGUACUUCAACGGCAAGGACAACUCCCGGGAGUGGCAGGAGUUCAAGGCCCGGGUGGAGACCUCCCGGUU |
| | | CCCCCGGUCCAAGAAGCAGCGGAUCCUGCUGCAGAAGUUCGACGAGGACGGCUUCAAGGAGUGCAACCUGAACGACACCCGGUACGUGAAC |
| | | CGCUUCCUGUGCCAGUUCGUGGCCGACCACAUCCUGCUGACCGGCAAGGGCAAGCGGCGGGUGUUCGCCUCCAACGGCCAGAUCACCAACC |
| | | UGCUGCGGGGCUUCUGGGGCCUGCGGAAGGUGCGGGCCGAGAACGACCGGCACCACGCCCUGGACGCCGUGGUGGUGGCCUGCUCCACCGU |
| | | GGCCAUGCAGCAGAAGAUCACCCGGUUCGUGCGGUACAAGGAGAUGAACGCCUUCGACGGCAAGACCAUCGACAAGGAGACCGGCAAGGUG |
| | | CUGCACCAGAAGACCCACUUCCCCCAGCCCUGGGAGUUCUUCGCCCAGGAGGUGAUGAUCCGGGUGUUCGGCAAGCCCGACGGCAAGCCCG |
| | | AGUUCGAGGAGGCCGACACCCCCGAGAAGCUGCGGACCCUGCUGGCCGAGAAGCUGUCCUCCCGGCCCGAGGCCGUGCACGAGUACGUGAC |
| | | CCCCCUGUUCGUGUCCCGGGCCCCCAACCGGAAGAUGUCCGGCGCCCACAAGGACACCCUGCGGUCCGCCAAGCGGUUCGUGAAGCACAAC |
| | | GAGAAGAUCUCCGUGAAGCGGGUGUGGCUGACCGAGAUCAAGCUGGCCGACCUGGAGAACAUGGUGAACUACAAGAACGGCCGGGAGAUCG |
| | | AGCUGUACGAGGCCCUGAAGGCCCGGCUGGAGGCCUACGGCGGCAACGCCAAGCAGGCCUUCGACCCCAAGGACAACCCCUUCUACAAGAA |
| | | GGGCGGCCAGCUGGUGAAGGCCGUGCGGGUGGAGAAGACCCAGGAGUCCGGCGUGCUGCUGAACAAGAAGAACGCCUACACCAUCGCCGAC |
| | | AACGGCGACAUGGUGCGGGUGGACGUGUUCUGCAAGGUGGACAAGAAGGGCAAGAACCAGUACUUCAUCGUGCCCAUCUACGCCUGGCAGG |
| | | UGGCCGAGAACAUCCUGCCCGACAUCGACUGCAAGGGCUACCGGAUCGACGACUCCUACACCUUCUGCUUCUCCCUGCACAAGUACGACCU |
| | | GAUCGCCUUCCAGAAGGACGAGAAGUCCAAGGUGGAGUUCGCCUACUACAUCAACUGCGACUCCUCCAACGGCCGGUUCUACCUGGCCUGG |
| | | CACGACAAGGGCUCCAAGGAGCAGCAGUUCCGGAUCUCCACCCAGAACCUGGUGCUGAUCCAGAAGUACCAGGUGAACGAGCUGGGCAAGG |
| | | AGAUCCGGCCCUGCCGGCUGAAGAAGCGGCCCCCCGUGCGGUCCGGAAAGCGGACCGCCGACGGCUCCGGAGGAGGAAGCCCGAAGAAGAA |
| | | GAGAAAGGUCUAG |
| 62 | Cas9- | MDKKYSIGLDIGTNSVGWAVITDEYKVPSKKFKVLGNTDRHSIKKNLIGALLFDSGETAEATRLKRTARRRYTRRKNRICYLQEIFSNEMA |
| | Cas9 | KVDDSFFHRLEESFLVEEDKKHERHPIFGNIVDEVAYHEKYPTIYHLRKKLVDSTDKADLRLIYLALAHMIKFRGHFLIEGDLNPDNSDVD |
| | fusion- | KLFIQLVQTYNQLFEENPINASGVDAKAILSARLSKSRRLENLIAQLPGEKKNGLFGNLIALSLGLTPNFKSNFDLAEDAKLQLSKDTYDD |
| | 51 | DLDNLLAQIGDQYADLFLAAKNLSDAILLSDILRVNTEITKAPLSASMIKRYDEHHQDLTLLKALVRQQLPEKYKEIFFDQSKNGYAGYID |
| | amino | GGASQEEFYKFIKPILEKMDGTEELLVKLNREDLLRKQRTFDNGSIPHQIHLGELHAILRRQEDFYPFLKDNREKIEKILTFRIPYYVGPL |
| | acid | ARGNSRFAWMTRKSEETITPWNFEEVVDKGASAQSFIERMTNFDKNLPNEKVLPKHSLLYEYFTVYNELTKVKYVTEGMRKPAFLSGEQKK |
| | residual | AIVDLLFKTNRKVTVKQLKEDYFKKIECFDSVEISGVEDRFNASLGTYHDLLKIIKDKDFLDNEENEDILEDIVLTLTLFEDREMIEERLK |
| | linker | TYAHLFDDKVMKQLKRRRYTGWGRLSRKLINGIRDKQSGKTILDFLKSDGFANRNFMQLIHDDSLTFKEDIQKAQVSGQGDSLHEHIANLA |
| | (mRNA | GSPAIKKGILQTVKVVDELVKVMGRHKPENIVIEMARENQTTQKGQKNSRERMKRIEEGIKELGSQILKEHPVENTQLQNEKLYLYYLQNG |
| | Q)- | RDMYVDQELDINRLSDYDVDHIVPQSFLKDDSIDNKVLTRSDKNRGKSDNVPSEEVVKKMKNYWRQLLNAKLITQRKFDNLTKAERGGLSE |
| | mRNA | LDKAGFIKRQLVETRQITKHVAQILDSRMNTKYDENDKLIREVKVITLKSKLVSDFRKDFQFYKVREINNYHHAHDAYLNAVVGTALIKKY |
| | sequence | PKLESEFVYGDYKVYDVRKMIAKSEQEIGKATAKYFFYSNIMNFFKTEITLANGEIRKRPLIETNGETGEIVWDKGRDFATVRKVLSMPQV |
| | | NIVKKTEVQTGGFSKESILPKRNSDKLIARKKDWDPKKYGGFDSPTVAYSVLVVAKVEKGKSKKLKSVKELLGITIMERSSFEKNPIDFLE |
| | | AKGYKEVKKDLIIKLPKYSLFELENGRKRMLASAGELQKGNELALPSKYVNFLYLASHYEKLKGSPEDNEQKQLFVEQHKHYLDEIIEQIS |
| | | EFSKRVILADANLDKVLSAYNKHRDKPIREQAENIIHLFTLTNLGAPAAFKYFDTTIDKKRYTSTKEVLDATLIHQSITGLYETRIDLSQL |
| | | GGDGAPESATESGGTSTESEGSAGTSTESEGSAGSAGSTSTEEGTSTESEGSSSGAAFKPNPINYILGLDIGIASVGWAMVEIDEEENPIR |
| | | LIDLGVRVFERAEVPKTGDSLAMARRLARSVRRLTRRRAHRLLRARRLLKREGVLQAADFDENGLIKSLPNTPWQLRAAALDRKLTPLEWS |
| | | AVLLHLIKHRGYLSQRKNEGETADKELGALLKGVANNAHALQTGDFRTPAELALNKFEKESGHIRNQRGDYSHTFSRKDLQAELILLFEKQ |
| | | KEFGNPHVSGGLKEGIETLLMTQRPALSGDAVQKMLGHCTFEPAEPKAAKNTYTAERFIWLTKLNNLRILEQGSERPLTDTERATLMDEPY |
| | | RKSKLTYAQARKLLGLEDTAFFKGLRYGKDNAEASTLMEMKAYHAISRALEKEGLKDKKSPLNLSSELQDEIGTAFSLFKTDEDITGRLKD |
| | | RVQPEILEALLKHISFDKFVQISLKALRRIVPLMEQGKRYDEACAEIYGDHYGKKNTEEKIYLPPIPADEIRNPVVLRALSQARKVINGVV |
| | | RRYGSPARIHIETAREVGKSFKDRKEIEKRQEENRKDREKAAAKFREYFPNFVGEPKSKDILKLRLYEQQHGKCLYSGKEINLVRLNEKGY |
| | | VEIDHALPFSRTWDDSFNNKVLVLGSENQNKGNQTPYEYFNGKDNSREWQEFKARVETSRFPRSKKQRILLQKFDEDGFKECNLNDTRYVN |
| | | RFLCQFVADHILLTGKGKRRVFASNGQITNLLRGFWGLRKVRAENDRHHALDAVVVACSTVAMQQKITRFVRYKEMNAFDGKTIDKETGKV |
| | | LHQKTHFPQPWEFFAQEVMIRVFGKPDGKPEFEEADTPEKLRTLLAEKLSSRPEAVHEYVTPLFVSRAPNRKMSGAHKDTLRSAKRFVKHN |
| | | EKISVKRVWLTEIKLADLENMVNYKNGREIELYEALKARLEAYGGNAKQAFDPKDNPFYKKGGQLVKAVRVEKTQESGVLLNKKNAYTIAD |
| | | NGDMVRVDVFCKVDKKGKNQYFIVPIYAWQVAENILPDIDCKGYRIDDSYTFCFSLHKYDLIAFQKDEKSKVEFAYYINCDSSNGRFYLAW |
| | | HDKGSKEQQFRISTQNLVLIQKYQVNELGKEIRPCRLKKRPPVRSGKRTADGSGGGSPKKKRKV* |
| 63 | Cas9- | GGGAAGCUCAGAAUAAACGCUCAACUUUGGCCGGAUCUGCCACCAUGGACAAGAAGUACUCCAUCGGCCUGGACAUCGGCACCAACUCCGU |
| | Cas9 | GGGCUGGGCCGUGAUCACCGACGAGUACAAGGUGCCCUCCAAGAAGUUCAAGGUGCUGGGCAACACCGACCGGCACUCCAUCAAGAAGAAC |
| | fusion- | CUGAUCGGCGCCCUGCUGUUCGACUCCGGCGAGACCGCCGAGGCCACCCGGCUGAAGCGGACCGCCCGGCGGCGGUACACCCGGCGGAAGA |
| | 41 | ACCGGAUCUGCUACCUGCAGGAGAUCUUCUCCAACGAGAUGGCCAAGGUGGACGACUCCUUCUUCCACCGGCUGGAGGAGUCCUUCCUGGU |
| | amino | GGAGGAGGACAAGAAGCACGAGCGGCACCCCAUCUUCGGCAACAUCGUGGACGAGGUGGCCUACCACGAGAAGUACCCCACCAUCUACCAC |
| | acid | CUGCGGAAGAAGCUGGUGGACUCCACCGACAAGGCCGACCUGCGGCUGAUCUACCUGGCCCUGGCCCACAUGAUCAAGUUCCGGGGCCACU |
| | residue | UCCUGAUCGAGGGCGACCUGAACCCCGACAACUCCGACGUGGACAAGCUGUUCAUCCAGCUGGUGCAGACCUACAACCAGCUGUUCGAGGA |
| | linker | GAACCCCAUCAACGCCUCCGGCGUGGACGCCAAGGCCAUCCUGUCCGCCCGGCUGUCCAAGUCCCGGCGGCUGGAGAACCUGAUCGCCCAG |
| | and | CUGCCCGGCGAGAAGAAGAACGGCCUGUUCGGCAACCUGAUCGCCCUGUCCCUGGGCCUGACCCCCAACUUCAAGUCCAACUUCGACCUGG |
| | HiBit | CCGAGGACGCCAAGCUGCAGCUGUCCAAGGACACCUACGACGACGACCUGGACAACCUGCUGGCCCAGAUCGGCGACCAGUACGCCGACCU |
| | tag | GUUCCUGGCCGCCAAGAACCUGUCCGACGCCAUCCUGCUGUCCGACAUCCUGCGGGUGAACACCGAGAUCACCAAGGCCCCCCUGUCCGCC |
| | (mRNA | UCCAUGAUCAAGCGGUACGACGAGCACCACCAGGACCUGACCCUGCUGAAGGCCCUGGUGCGGCAGCAGCUGCCCGAGAAGUACAAGGAGA |
| | R)- | UCUUCUUCGACCAGUCCAAGAACGGCUACGCCGGCUACAUCGACGGCGGCGCCUCCCAGGAGGAGUUCUACAAGUUCAUCAAGCCCAUCCU |
| | mRNA | GGAGAAGAUGGACGGCACCGAGGAGCUGCUGGUGAAGCUGAACCGGGAGGACCUGCUGCGGAAGCAGCGGACCUUCGACAACGGCUCCAUC |
| | sequence | CCCCACCAGAUCCACCUGGGCGAGCUGCACGCCAUCCUGCGGCGGCAGGAGGACUUCUACCCCUUCCUGAAGGACAACCGGGAGAAGAUCG |
| | | AGAAGAUCCUGACCUUCCGGAUCCCCUACUACGUGGGCCCCCUGGCCCGGGGCAACUCCCGGUUCGCCUGGAUGACCCGGAAGUCCGAGGA |
| | | GACCAUCACCCCCUGGAACUUCGAGGAGGUGGUGGACAAGGGCGCCUCCGCCCAGUCCUUCAUCGAGCGGAUGACCAACUUCGACAAGAAC |
| | | CUGCCCAACGAGAAGGUGCUGCCCAAGCACUCCCUGCUGUACGAGUACUUCACCGUGUACAACGAGCUGACCAAGGUGAAGUACGUGACCG |
| | | AGGGCAUGCGGAAGCCCGCCUUCCUGUCCGGCGAGCAGAAGAAGGCCAUCGUGGACCUGCUGUUCAAGACCAACCGGAAGGUGACCGUGAA |
| | | GCAGCUGAAGGAGGACUACUUCAAGAAGAUCGAGUGCUUCGACUCCGUGGAGAUCUCCGGCGUGGAGGACCGGUUCAACGCCUCCCUGGGC |
| | | ACCUACCACGACCUGCUGAAGAUCAUCAAGGACAAGGACUUCCUGGACAACGAGGAGAACGAGGACAUCCUGGAGGACAUCGUGCUGACCC |
| | | UGACCCUGUUCGAGGACCGGGAGAUGAUCGAGGAGCGGCUGAAGACCUACGCCCACCUGUUCGACGACAAGGUGAUGAAGCAGCUGAAGCG |
| | | GCGGCGGUACACCGGCUGGGGCCGGCUGUCCCGGAAGCUGAUCAACGGCAUCCGGGACAAGCAGUCCGGCAAGACCAUCCUGGACUUCCUG |
| | | AAGUCCGACGGCUUCGCCAACCGGAACUUCAUGCAGCUGAUCCACGACGACUCCCUGACCUUCAAGGAGGACAUCCAGAAGGCCCAGGUGU |
| | | CCGGCCAGGGCGACUCCCUGCACGAGCACAUCGCCAACCUGGCCGGCUCCCCCGCCAUCAAGAAGGGCAUCCUGCAGACCGUGAAGGUGGU |
| | | GGACGAGCUGGUGAAGGUGAUGGGCCGGCACAAGCCCGAGAACAUCGUGAUCGAGAUGGCCCGGGAGAACCAGACCACCCAGAAGGGCCAG |
| | | AAGAACUCCCGGGAGCGGAUGAAGCGGAUCGAGGAGGGCAUCAAGGAGCUGGGCUCCCAGAUCCUGAAGGAGCACCCCGUGGAGAACACCC |
| | | AGCUGCAGAACGAGAAGCUGUACCUGUACUACCUGCAGAACGGCCGGGACAUGUACGUGGACCAGGAGCUGGACAUCAACCGGCUGUCCGA |
| | | CUACGACGUGGACCACAUCGUGCCCCAGUCCUUCCUGAAGGACGACUCCAUCGACAACAAGGUGCUGACCCGGUCCGACAAGAACCGGGGC |
| | | AAGUCCGACAACGUGCCCUCCGAGGAGGUGGUGAAGAAGAUGAAGAACUACUGGCGGCAGCUGCUGAACGCCAAGCUGAUCACCCAGCGGA |
| | | AGUUCGACAACCUGACCAAGGCCGAGCGGGGCGGCCUGUCCGAGCUGGACAAGGCCGGCUUCAUCAAGCGGCAGCUGGUGGAGACCCGGCA |
| | | GAUCACCAAGCACGUGGCCCAGAUCCUGGACUCCCGGAUGAACACCAAGUACGACGAGAACGACAAGCUGAUCCGGGAGGUGAAGGUGAUC |
| | | ACCCUGAAGUCCAAGCUGGUGUCCGACUUCCGGAAGGACUUCCAGUUCUACAAGGUGCGGGAGAUCAACAACUACCACCACGCCCACGACG |
| | | CCUACCUGAACGCCGUGGUGGGCACCGCCCUGAUCAAGAAGUACCCCAAGCUGGAGUCCGAGUUCGUGUACGGCGACUACAAGGUGUACGA |
| | | CGUGCGGAAGAUGAUCGCCAAGUCCGAGCAGGAGAUCGGCAAGGCCACCGCCAAGUACUUCUUCUACUCCAACAUCAUGAACUUCUUCAAG |
| | | ACCGAGAUCACCCUGGCCAACGGCGAGAUCCGGAAGCGGCCCCUGAUCGAGACCAACGGCGAGACCGGCGAGAUCGUGUGGGACAAGGGCC |
| | | GGGACUUCGCCACCGUGCGGAAGGUGCUGUCCAUGCCCCAGGUGAACAUCGUGAAGAAGACCGAGGUGCAGACCGGCGGCUUCUCCAAGGA |
| | | GUCCAUCCUGCCCAAGCGGAACUCCGACAAGCUGAUCGCCCGGAAGAAGGACUGGGACCCCAAGAAGUACGGCGGCUUCGACUCCCCCACC |
| | | GUGGCCUACUCCGUGCUGGUGGUGGCCAAGGUGGAGAAGGGCAAGUCCAAGAAGCUGAAGUCCGUGAAGGAGCUGCUGGGCAUCACCAUCA |
| | | UGGAGCGGUCCUCCUUCGAGAAGAACCCCAUCGACUUCCUGGAGGCCAAGGGCUACAAGGAGGUGAAGAAGGACCUGAUCAUCAAGCUGCC |
| | | CAAGUACUCCCUGUUCGAGCUGGAGAACGGCCGGAAGCGGAUGCUGGCCUCCGCCGGCGAGCUGCAGAAGGGCAACGAGCUGGCCCUGCCC |
| | | UCCAAGUACGUGAACUUCCUGUACCUGGCCUCCCACUACGAGAAGCUGAAGGGCUCCCCCGAGGACAACGAGCAGAAGCAGCUGUUCGUGG |
| | | AGCAGCACAAGCACUACCUGGACGAGAUCAUCGAGCAGAUCUCCGAGUUCUCCAAGCGGGUGAUCCUGGCCGACGCCAACCUGGACAAGGU |
| | | GCUGUCCGCCUACAACAAGCACCGGGACAAGCCCAUCCGGGAGCAGGCCGAGAACAUCAUCCACCUGUUCACCCUGACCAACCUGGGCGCC |
| | | CCCGCCGCCUUCAAGUACUUCGACACCACCAUCGACAAGAAGCGGUACACCUCCACCAAGGAGGUGCUGGACGCCACCCUGAUCCACCAGU |
| | | CCAUCACCGGCCUGUACGAGACCCGGAUCGACCUGUCCCAGCUGGGGGGCGACGGCGCCCCCGAGUCCGCCACCGAGUCCGGCGGCACCUC |
| | | CACCGAGUCCGAGGGCUCCGCCGGCACCUCCACCGAGUCCGAGGGCUCCGCCGGCUCCGCCGGCUCCACCUCCGGCUCCUCCUCCGGUGCC |
| | | GCCUUCAAGCCCAACCCCAUCAACUACAUCCUGGGCCUGGACAUCGGCAUCGCCUCCGUGGGCUGGGCCAUGGUGGAGAUCGACGAGGAGG |
| | | AGAACCCCAUCCGGCUGAUCGACCUGGGCGUGCGGGUGUUCGAGCGGGCCGAGGUGCCCAAGACCGGCGACUCCCUGGCCAUGGCCCGGCG |
| | | GCUGGCCCGGUCCGUGCGGCGGCUGACCCGGCGGCGGGCCCACCGGCUGCUGCGGGCCCGGCGGCUGCUGAAGCGGGAGGGCGUGCUGCAG |
| | | GCCGCCGACUUCGACGAGAACGGCCUGAUCAAGUCCCUGCCCAACACCCCCUGGCAGCUGCGGGCCGCCGCCCUGGACCGGAAGCUGACCC |
| | | CCCUGGAGUGGUCCGCCGUGCUGCUGCACCUGAUCAAGCACCGGGGCUACCUGUCCCAGCGGAAGAACGAGGGCGAGACCGCCGACAAGGA |
| | | GCUGGGCGCCCUGCUGAAGGGCGUGGCCAACAACGCCCACGCCCUGCAGACCGGCGACUUCCGGACCCCCGCCGAGCUGGCCCUGAACAAG |
| | | UUCGAGAAGGAGUCCGGCCACAUCCGGAACCAGCGGGGCGACUACUCCCACACCUUCUCCCGGAAGGACCUGCAGGCCGAGCUGAUCCUGC |
| | | UGUUCGAGAAGCAGAAGGAGUUCGGCAACCCCCACGUGUCCGGCGGCCUGAAGGAGGGCAUCGAGACCCUGCUGAUGACCCAGCGGCCCGC |
| | | CCUGUCCGGCGACGCCGUGCAGAAGAUGCUGGGCCACUGCACCUUCGAGCCCGCCGAGCCCAAGGCCGCCAAGAACACCUACACCGCCGAG |
| | | CGGUUCAUCUGGCUGACCAAGCUGAACAACCUGCGGAUCCUGGAGCAGGGCUCCGAGCGGCCCCUGACCGACACCGAGCGGGCCACCCUGA |
| | | UGGACGAGCCCUACCGGAAGUCCAAGCUGACCUACGCCCAGGCCCGGAAGCUGCUGGGCCUGGAGGACACCGCCUUCUUCAAGGGCCUGCG |
| | | GUACGGCAAGGACAACGCCGAGGCCUCCACCCUGAUGGAGAUGAAGGCCUACCACGCCAUCUCCCGGGCCCUGGAGAAGGAGGGCCUGAAG |
| | | GACAAGAAGUCCCCCCUGAACCUGUCCUCCGAGCUGCAGGACGAGAUCGGCACCGCCUUCUCCCUGUUCAAGACCGACGAGGACAUCACCG |
| | | GCCGGCUGAAGGACCGGGUGCAGCCCGAGAUCCUGGAGGCCCUGCUGAAGCACAUCUCCUUCGACAAGUUCGUGCAGAUCUCCCUGAAGGC |
| | | CCUGCGGCGGAUCGUGCCCCUGAUGGAGCAGGGCAAGCGGUACGACGAGGCCUGCGCCGAGAUCUACGGCGACCACUACGGCAAGAAGAAC |
| | | ACCGAGGAGAAGAUCUACCUGCCCCCCAUCCCCGCCGACGAGAUCCGGAACCCCGUGGUGCUGCGGGCCCUGUCCCAGGCCCGGAAGGUGA |
| | | UCAACGGCGUGGUGCGGCGGUACGGCUCCCCCGCCCGGAUCCACAUCGAGACCGCCCGGGAGGUGGGCAAGUCCUUCAAGGACCGGAAGGA |
| | | GAUCGAGAAGCGGCAGGAGGAGAACCGGAAGGACCGGGAGAAGGCCGCCGCCAAGUUCCGGGAGUACUUCCCCAACUUCGUGGGCGAGCCC |
| | | AAGUCCAAGGACAUCCUGAAGCUGCGGCUGUACGAGCAGCAGCACGGCAAGUGCCUGUACUCCGGCAAGGAGAUCAACCUGGUGCGGCUGA |
| | | ACGAGAAGGGCUACGUGGAGAUCGACCACGCCCUGCCCUUCUCCCGGACCUGGGACGACUCCUUCAACAACAAGGUGCUGGUGCUGGGCUC |
| | | CGAGAACCAGAACAAGGGCAACCAGACCCCCUACGAGUACUUCAACGGCAAGGACAACUCCCGGGAGUGGCAGGAGUUCAAGGCCCGGGUG |
| | | GAGACCUCCCGGUUCCCCCGGUCCAAGAAGCAGCGGAUCCUGCUGCAGAAGUUCGACGAGGACGGCUUCAAGGAGUGCAACCUGAACGACA |
| | | CCCGGUACGUGAACCGCUUCCUGUGCCAGUUCGUGGCCGACCACAUCCUGCUGACCGGCAAGGGCAAGCGGCGGGUGUUCGCCUCCAACGG |
| | | CCAGAUCACCAACCUGCUGCGGGGCUUCUGGGGCCUGCGGAAGGUGCGGGCCGAGAACGACCGGCACCACGCCCUGGACGCCGUGGUGGUG |
| | | GCCUGCUCCACCGUGGCCAUGCAGCAGAAGAUCACCCGGUUCGUGCGGUACAAGGAGAUGAACGCCUUCGACGGCAAGACCAUCGACAAGG |
| | | AGACCGGCAAGGUGCUGCACCAGAAGACCCACUUCCCCCAGCCCUGGGAGUUCUUCGCCCAGGAGGUGAUGAUCCGGGUGUUCGGCAAGCC |
| | | CGACGGCAAGCCCGAGUUCGAGGAGGCCGACACCCCCGAGAAGCUGCGGACCCUGCUGGCCGAGAAGCUGUCCUCCCGGCCCGAGGCCGUG |
| | | CACGAGUACGUGACCCCCCUGUUCGUGUCCCGGGCCCCCAACCGGAAGAUGUCCGGCGCCCACAAGGACACCCUGCGGUCCGCCAAGCGGU |
| | | UCGUGAAGCACAACGAGAAGAUCUCCGUGAAGCGGGUGUGGCUGACCGAGAUCAAGCUGGCCGACCUGGAGAACAUGGUGAACUACAAGAA |
| | | CGGCCGGGAGAUCGAGCUGUACGAGGCCCUGAAGGCCCGGCUGGAGGCCUACGGCGGCAACGCCAAGCAGGCCUUCGACCCCAAGGACAAC |
| | | CCCUUCUACAAGAAGGGCGGCCAGCUGGUGAAGGCCGUGCGGGUGGAGAAGACCCAGGAGUCCGGCGUGCUGCUGAACAAGAAGAACGCCU |
| | | ACACCAUCGCCGACAACGGCGACAUGGUGCGGGUGGACGUGUUCUGCAAGGUGGACAAGAAGGGCAAGAACCAGUACUUCAUCGUGCCCAU |
| | | CUACGCCUGGCAGGUGGCCGAGAACAUCCUGCCCGACAUCGACUGCAAGGGCUACCGGAUCGACGACUCCUACACCUUCUGCUUCUCCCUG |
| | | CACAAGUACGACCUGAUCGCCUUCCAGAAGGACGAGAAGUCCAAGGUGGAGUUCGCCUACUACAUCAACUGCGACUCCUCCAACGGCCGGU |
| | | UCUACCUGGCCUGGCACGACAAGGGCUCCAAGGAGCAGCAGUUCCGGAUCUCCACCCAGAACCUGGUGCUGAUCCAGAAGUACCAGGUGAA |
| | | CGAGCUGGGCAAGGAGAUCCGGCCCUGCCGGCUGAAGAAGCGGCCCCCCGUGCGGUCCGGAAAGCGGACCGCCGACGGCUCCGGAGGAGGA |
| | | AGCCCGAAGAAGAAGAGAAAGGUCAGCGAAAGCGCAACACCGGAAAGCGUCAGCGGAUGGAGACUGUUCAAGAAGAUCAGCUAGCUAGCAC |
| | | CAGCCUCAAGAACACCCGAAUGGAGUCUCUAAGCUACAUAAUACCAACUUACACUUUACAAAAUGUUGUCCCCCAAAAUGUAGCCAUUCGU |
| | | AUCUGCUCCUAAUAAAAAGAAAGUUUCUUCACAUUCUCUCGAGAAAAAAAAAAAAUGGAAAAAAAAAAAACGGAAAAAAAAAAAAGGUAAA |
| | | AAAAAAAAAUAUAAAAAAAAAAAACAUAAAAAAAAAAAACGAAAAAAAAAAAACGUAAAAAAAAAAAACUCAAAAAAAAAAAAGAUAAAAA |
| | | AAAAAAACCUAAAAAAAAAAAAUGUAAAAAAAAAAAAGGGAAAAAAAAAAAACGCAAAAAAAAAAAACACAAAAAAAAAAAAUGCAAAAAA |
| | | AAAAAAUCGAAAAAAAAAAAAUCUAAAAAAAAAAAACGAAAAAAAAAAAACCCAAAAAAAAAAAAGACAAAAAAAAAAAAUAGAAAAAAAA |
| | | AAAAGUUAAAAAAAAAAAACUGAAAAAAAAAAAAUUUAAAAAAAAAAAAUCUAG |
| 64 | Cas9- | AUGGACAAGAAGUACUCCAUCGGCCUGGACAUCGGCACCAACUCCGUGGGCUGGGCCGUGAUCACCGACGAGUACAAGGUGCCCUCCAAGA |
| | Cas9 | AGUUCAAGGUGCUGGGCAACACCGACCGGCACUCCAUCAAGAAGAACCUGAUCGGCGCCCUGCUGUUCGACUCCGGCGAGACCGCCGAGGC |
| | fusion- | CACCCGGCUGAAGCGGACCGCCCGGCGGCGGUACACCCGGCGGAAGAACCGGAUCUGCUACCUGCAGGAGAUCUUCUCCAACGAGAUGGCC |
| | 41 | AAGGUGGACGACUCCUUCUUCCACCGGCUGGAGGAGUCCUUCCUGGUGGAGGAGGACAAGAAGCACGAGCGGCACCCCAUCUUCGGCAACA |
| | amino | UCGUGGACGAGGUGGCCUACCACGAGAAGUACCCCACCAUCUACCACCUGCGGAAGAAGCUGGUGGACUCCACCGACAAGGCCGACCUGCG |
| | acid | GCUGAUCUACCUGGCCCUGGCCCACAUGAUCAAGUUCCGGGGCCACUUCCUGAUCGAGGGCGACCUGAACCCCGACAACUCCGACGUGGAC |
| | residue | AAGCUGUUCAUCCAGCUGGUGCAGACCUACAACCAGCUGUUCGAGGAGAACCCCAUCAACGCCUCCGGCGUGGACGCCAAGGCCAUCCUGU |
| | linker | CCGCCCGGCUGUCCAAGUCCCGGCGGCUGGAGAACCUGAUCGCCCAGCUGCCCGGCGAGAAGAAGAACGGCCUGUUCGGCAACCUGAUCGC |
| | and | CCUGUCCCUGGGCCUGACCCCCAACUUCAAGUCCAACUUCGACCUGGCCGAGGACGCCAAGCUGCAGCUGUCCAAGGACACCUACGACGAC |
| | HiBit | GACCUGGACAACCUGCUGGCCCAGAUCGGCGACCAGUACGCCGACCUGUUCCUGGCCGCCAAGAACCUGUCCGACGCCAUCCUGCUGUCCG |
| | tag | ACAUCCUGCGGGUGAACACCGAGAUCACCAAGGCCCCCCUGUCCGCCUCCAUGAUCAAGCGGUACGACGAGCACCACCAGGACCUGACCCU |
| | (mRNA | GCUGAAGGCCCUGGUGCGGCAGCAGCUGCCCGAGAAGUACAAGGAGAUCUUCUUCGACCAGUCCAAGAACGGCUACGCCGGCUACAUCGAC |
| | R)-ORF | GGCGGCGCCUCCCAGGAGGAGUUCUACAAGUUCAUCAAGCCCAUCCUGGAGAAGAUGGACGGCACCGAGGAGCUGCUGGUGAAGCUGAACC |
| | sequence | GGGAGGACCUGCUGCGGAAGCAGCGGACCUUCGACAACGGCUCCAUCCCCCACCAGAUCCACCUGGGCGAGCUGCACGCCAUCCUGCGGCG |
| | | GCAGGAGGACUUCUACCCCUUCCUGAAGGACAACCGGGAGAAGAUCGAGAAGAUCCUGACCUUCCGGAUCCCCUACUACGUGGGCCCCCUG |
| | | GCCCGGGGCAACUCCCGGUUCGCCUGGAUGACCCGGAAGUCCGAGGAGACCAUCACCCCCUGGAACUUCGAGGAGGUGGUGGACAAGGGCG |
| | | CCUCCGCCCAGUCCUUCAUCGAGCGGAUGACCAACUUCGACAAGAACCUGCCCAACGAGAAGGUGCUGCCCAAGCACUCCCUGCUGUACGA |
| | | GUACUUCACCGUGUACAACGAGCUGACCAAGGUGAAGUACGUGACCGAGGGCAUGCGGAAGCCCGCCUUCCUGUCCGGCGAGCAGAAGAAG |
| | | GCCAUCGUGGACCUGCUGUUCAAGACCAACCGGAAGGUGACCGUGAAGCAGCUGAAGGAGGACUACUUCAAGAAGAUCGAGUGCUUCGACU |
| | | CCGUGGAGAUCUCCGGCGUGGAGGACCGGUUCAACGCCUCCCUGGGCACCUACCACGACCUGCUGAAGAUCAUCAAGGACAAGGACUUCCU |
| | | GGACAACGAGGAGAACGAGGACAUCCUGGAGGACAUCGUGCUGACCCUGACCCUGUUCGAGGACCGGGAGAUGAUCGAGGAGCGGCUGAAG |
| | | ACCUACGCCCACCUGUUCGACGACAAGGUGAUGAAGCAGCUGAAGCGGCGGCGGUACACCGGCUGGGGCCGGCUGUCCCGGAAGCUGAUCA |
| | | ACGGCAUCCGGGACAAGCAGUCCGGCAAGACCAUCCUGGACUUCCUGAAGUCCGACGGCUUCGCCAACCGGAACUUCAUGCAGCUGAUCCA |
| | | CGACGACUCCCUGACCUUCAAGGAGGACAUCCAGAAGGCCCAGGUGUCCGGCCAGGGCGACUCCCUGCACGAGCACAUCGCCAACCUGGCC |
| | | GGCUCCCCCGCCAUCAAGAAGGGCAUCCUGCAGACCGUGAAGGUGGUGGACGAGCUGGUGAAGGUGAUGGGCCGGCACAAGCCCGAGAACA |
| | | UCGUGAUCGAGAUGGCCCGGGAGAACCAGACCACCCAGAAGGGCCAGAAGAACUCCCGGGAGCGGAUGAAGCGGAUCGAGGAGGGCAUCAA |
| | | GGAGCUGGGCUCCCAGAUCCUGAAGGAGCACCCCGUGGAGAACACCCAGCUGCAGAACGAGAAGCUGUACCUGUACUACCUGCAGAACGGC |
| | | CGGGACAUGUACGUGGACCAGGAGCUGGACAUCAACCGGCUGUCCGACUACGACGUGGACCACAUCGUGCCCCAGUCCUUCCUGAAGGACG |
| | | ACUCCAUCGACAACAAGGUGCUGACCCGGUCCGACAAGAACCGGGGCAAGUCCGACAACGUGCCCUCCGAGGAGGUGGUGAAGAAGAUGAA |
| | | GAACUACUGGCGGCAGCUGCUGAACGCCAAGCUGAUCACCCAGCGGAAGUUCGACAACCUGACCAAGGCCGAGCGGGGCGGCCUGUCCGAG |
| | | CUGGACAAGGCCGGCUUCAUCAAGCGGCAGCUGGUGGAGACCCGGCAGAUCACCAAGCACGUGGCCCAGAUCCUGGACUCCCGGAUGAACA |
| | | CCAAGUACGACGAGAACGACAAGCUGAUCCGGGAGGUGAAGGUGAUCACCCUGAAGUCCAAGCUGGUGUCCGACUUCCGGAAGGACUUCCA |
| | | GUUCUACAAGGUGCGGGAGAUCAACAACUACCACCACGCCCACGACGCCUACCUGAACGCCGUGGUGGGCACCGCCCUGAUCAAGAAGUAC |
| | | CCCAAGCUGGAGUCCGAGUUCGUGUACGGCGACUACAAGGUGUACGACGUGCGGAAGAUGAUCGCCAAGUCCGAGCAGGAGAUCGGCAAGG |
| | | CCACCGCCAAGUACUUCUUCUACUCCAACAUCAUGAACUUCUUCAAGACCGAGAUCACCCUGGCCAACGGCGAGAUCCGGAAGCGGCCCCU |
| | | GAUCGAGACCAACGGCGAGACCGGCGAGAUCGUGUGGGACAAGGGCCGGGACUUCGCCACCGUGCGGAAGGUGCUGUCCAUGCCCCAGGUG |
| | | AACAUCGUGAAGAAGACCGAGGUGCAGACCGGCGGCUUCUCCAAGGAGUCCAUCCUGCCCAAGCGGAACUCCGACAAGCUGAUCGCCCGGA |
| | | AGAAGGACUGGGACCCCAAGAAGUACGGCGGCUUCGACUCCCCCACCGUGGCCUACUCCGUGCUGGUGGUGGCCAAGGUGGAGAAGGGCAA |
| | | GUCCAAGAAGCUGAAGUCCGUGAAGGAGCUGCUGGGCAUCACCAUCAUGGAGCGGUCCUCCUUCGAGAAGAACCCCAUCGACUUCCUGGAG |
| | | GCCAAGGGCUACAAGGAGGUGAAGAAGGACCUGAUCAUCAAGCUGCCCAAGUACUCCCUGUUCGAGCUGGAGAACGGCCGGAAGCGGAUGC |
| | | UGGCCUCCGCCGGCGAGCUGCAGAAGGGCAACGAGCUGGCCCUGCCCUCCAAGUACGUGAACUUCCUGUACCUGGCCUCCCACUACGAGAA |
| | | GCUGAAGGGCUCCCCCGAGGACAACGAGCAGAAGCAGCUGUUCGUGGAGCAGCACAAGCACUACCUGGACGAGAUCAUCGAGCAGAUCUCC |
| | | GAGUUCUCCAAGCGGGUGAUCCUGGCCGACGCCAACCUGGACAAGGUGCUGUCCGCCUACAACAAGCACCGGGACAAGCCCAUCCGGGAGC |
| | | AGGCCGAGAACAUCAUCCACCUGUUCACCCUGACCAACCUGGGCGCCCCCGCCGCCUUCAAGUACUUCGACACCACCAUCGACAAGAAGCG |
| | | GUACACCUCCACCAAGGAGGUGCUGGACGCCACCCUGAUCCACCAGUCCAUCACCGGCCUGUACGAGACCCGGAUCGACCUGUCCCAGCUG |
| | | GGCGGCGACGGCGCCCCCGAGUCCGCCACCGAGUCCGGCGGCACCUCCACCGAGUCCGAGGGCUCCGCCGGCACCUCCACCGAGUCCGAGG |
| | | GCUCCGCCGGCUCCGCCGGCUCCACCUCCGGCUCCUCCUCCGGUGCCGCCUUCAAGCCCAACCCCAUCAACUACAUCCUGGGCCUGGACAU |
| | | CGGCAUCGCCUCCGUGGGCUGGGCCAUGGUGGAGAUCGACGAGGAGGAGAACCCCAUCCGGCUGAUCGACCUGGGCGUGCGGGUGUUCGAG |
| | | CGGGCCGAGGUGCCCAAGACCGGCGACUCCCUGGCCAUGGCCCGGCGGCUGGCCCGGUCCGUGCGGCGGCUGACCCGGCGGCGGGCCCACC |
| | | GGCUGCUGCGGGCCCGGCGGCUGCUGAAGCGGGAGGGCGUGCUGCAGGCCGCCGACUUCGACGAGAACGGCCUGAUCAAGUCCCUGCCCAA |
| | | CACCCCCUGGCAGCUGCGGGCCGCCGCCCUGGACCGGAAGCUGACCCCCCUGGAGUGGUCCGCCGUGCUGCUGCACCUGAUCAAGCACCGG |
| | | GGCUACCUGUCCCAGCGGAAGAACGAGGGCGAGACCGCCGACAAGGAGCUGGGCGCCCUGCUGAAGGGCGUGGCCAACAACGCCCACGCCC |
| | | UGCAGACCGGCGACUUCCGGACCCCCGCCGAGCUGGCCCUGAACAAGUUCGAGAAGGAGUCCGGCCACAUCCGGAACCAGCGGGGCGACUA |
| | | CUCCCACACCUUCUCCCGGAAGGACCUGCAGGCCGAGCUGAUCCUGCUGUUCGAGAAGCAGAAGGAGUUCGGCAACCCCCACGUGUCCGGC |
| | | GGCCUGAAGGAGGGCAUCGAGACCCUGCUGAUGACCCAGCGGCCCGCCCUGUCCGGCGACGCCGUGCAGAAGAUGCUGGGCCACUGCACCU |
| | | UCGAGCCCGCCGAGCCCAAGGCCGCCAAGAACACCUACACCGCCGAGCGGUUCAUCUGGCUGACCAAGCUGAACAACCUGCGGAUCCUGGA |
| | | GCAGGGCUCCGAGCGGCCCCUGACCGACACCGAGCGGGCCACCCUGAUGGACGAGCCCUACCGGAAGUCCAAGCUGACCUACGCCCAGGCC |
| | | CGGAAGCUGCUGGGCCUGGAGGACACCGCCUUCUUCAAGGGCCUGCGGUACGGCAAGGACAACGCCGAGGCCUCCACCCUGAUGGAGAUGA |
| | | AGGCCUACCACGCCAUCUCCCGGGCCCUGGAGAAGGAGGGCCUGAAGGACAAGAAGUCCCCCCUGAACCUGUCCUCCGAGCUGCAGGACGA |
| | | GAUCGGCACCGCCUUCUCCCUGUUCAAGACCGACGAGGACAUCACCGGCCGGCUGAAGGACCGGGUGCAGCCCGAGAUCCUGGAGGCCCUG |
| | | CUGAAGCACAUCUCCUUCGACAAGUUCGUGCAGAUCUCCCUGAAGGCCCUGCGGCGGAUCGUGCCCCUGAUGGAGCAGGGCAAGCGGUACG |
| | | ACGAGGCCUGCGCCGAGAUCUACGGCGACCACUACGGCAAGAAGAACACCGAGGAGAAGAUCUACCUGCCCCCCAUCCCCGCCGACGAGAU |
| | | CCGGAACCCCGUGGUGCUGCGGGCCCUGUCCCAGGCCCGGAAGGUGAUCAACGGCGUGGUGCGGCGGUACGGCUCCCCCGCCCGGAUCCAC |
| | | AUCGAGACCGCCCGGGAGGUGGGCAAGUCCUUCAAGGACCGGAAGGAGAUCGAGAAGCGGCAGGAGGAGAACCGGAAGGACCGGGAGAAGG |
| | | CCGCCGCCAAGUUCCGGGAGUACUUCCCCAACUUCGUGGGCGAGCCCAAGUCCAAGGACAUCCUGAAGCUGCGGCUGUACGAGCAGCAGCA |
| | | CGGCAAGUGCCUGUACUCCGGCAAGGAGAUCAACCUGGUGCGGCUGAACGAGAAGGGCUACGUGGAGAUCGACCACGCCCUGCCCUUCUCC |
| | | CGGACCUGGGACGACUCCUUCAACAACAAGGUGCUGGUGCUGGGCUCCGAGAACCAGAACAAGGGCAACCAGACCCCCUACGAGUACUUCA |
| | | ACGGCAAGGACAACUCCCGGGAGUGGCAGGAGUUCAAGGCCCGGGUGGAGACCUCCCGGUUCCCCCGGUCCAAGAAGCAGCGGAUCCUGCU |
| | | GCAGAAGUUCGACGAGGACGGCUUCAAGGAGUGCAACCUGAACGACACCCGGUACGUGAACCGCUUCCUGUGCCAGUUCGUGGCCGACCAC |
| | | AUCCUGCUGACCGGCAAGGGCAAGCGGCGGGUGUUCGCCUCCAACGGCCAGAUCACCAACCUGCUGCGGGGCUUCUGGGGCCUGCGGAAGG |
| | | UGCGGGCCGAGAACGACCGGCACCACGCCCUGGACGCCGUGGUGGUGGCCUGCUCCACCGUGGCCAUGCAGCAGAAGAUCACCCGGUUCGU |
| | | GCGGUACAAGGAGAUGAACGCCUUCGACGGCAAGACCAUCGACAAGGAGACCGGCAAGGUGCUGCACCAGAAGACCCACUUCCCCCAGCCC |
| | | UGGGAGUUCUUCGCCCAGGAGGUGAUGAUCCGGGUGUUCGGCAAGCCCGACGGCAAGCCCGAGUUCGAGGAGGCCGACACCCCCGAGAAGC |
| | | UGCGGACCCUGCUGGCCGAGAAGCUGUCCUCCCGGCCCGAGGCCGUGCACGAGUACGUGACCCCCCUGUUCGUGUCCCGGGCCCCCAACCG |
| | | GAAGAUGUCCGGCGCCCACAAGGACACCCUGCGGUCCGCCAAGCGGUUCGUGAAGCACAACGAGAAGAUCUCCGUGAAGCGGGUGUGGCUG |
| | | ACCGAGAUCAAGCUGGCCGACCUGGAGAACAUGGUGAACUACAAGAACGGCCGGGAGAUCGAGCUGUACGAGGCCCUGAAGGCCCGGCUGG |
| | | AGGCCUACGGCGGCAACGCCAAGCAGGCCUUCGACCCCAAGGACAACCCCUUCUACAAGAAGGGCGGCCAGCUGGUGAAGGCCGUGCGGGU |
| | | GGAGAAGACCCAGGAGUCCGGCGUGCUGCUGAACAAGAAGAACGCCUACACCAUCGCCGACAACGGCGACAUGGUGCGGGUGGACGUGUUC |
| | | UGCAAGGUGGACAAGAAGGGCAAGAACCAGUACUUCAUCGUGCCCAUCUACGCCUGGCAGGUGGCCGAGAACAUCCUGCCCGACAUCGACU |
| | | GCAAGGGCUACCGGAUCGACGACUCCUACACCUUCUGCUUCUCCCUGCACAAGUACGACCUGAUCGCCUUCCAGAAGGACGAGAAGUCCAA |
| | | GGUGGAGUUCGCCUACUACAUCAACUGCGACUCCUCCAACGGCCGGUUCUACCUGGCCUGGCACGACAAGGGCUCCAAGGAGCAGCAGUUC |
| | | CGGAUCUCCACCCAGAACCUGGUGCUGAUCCAGAAGUACCAGGUGAACGAGCUGGGCAAGGAGAUCCGGCCCUGCCGGCUGAAGAAGCGGC |
| | | CCCCCGUGCGGUCCGGAAAGCGGACCGCCGACGGCUCCGGAGGAGGAAGCCCGAAGAAGAAGAGAAAGGUCAGCGAAAGCGCAACACCGGA |
| | | AAGCGUCAGCGGAUGGAGACUGUUCAAGAAGAUCAGCUAG |
| 65 | Cas9- | MDKKYSIGLDIGTNSVGWAVITDEYKVPSKKFKVLGNTDRHSIKKNLIGALLFDSGETAEATRLKRTARRRYTRRKNRICYLQEIFSNEMA |
| | Cas9 | KVDDSFFHRLEESFLVEEDKKHERHPIFGNIVDEVAYHEKYPTIYHLRKKLVDSTDKADLRLIYLALAHMIKFRGHFLIEGDLNPDNSDVD |
| | fusion- | KLFIQLVQTYNQLFEENPINASGVDAKAILSARLSKSRRLENLIAQLPGEKKNGLFGNLIALSLGLTPNFKSNFDLAEDAKLQLSKDTYDD |
| | 41 | DLDNLLAQIGDQYADLFLAAKNLSDAILLSDILRVNTEITKAPLSASMIKRYDEHHQDLTLLKALVRQQLPEKYKEIFFDQSKNGYAGYID |
| | amino | GGASQEEFYKFIKPILEKMDGTEELLVKLNREDLLRKQRTFDNGSIPHQIHLGELHAILRRQEDFYPFLKDNREKIEKILTFRIPYYVGPL |
| | acid | ARGNSRFAWMTRKSEETITPWNFEEVVDKGASAQSFIERMTNFDKNLPNEKVLPKHSLLYEYFTVYNELTKVKYVTEGMRKPAFLSGEQKK |
| | residue | AIVDLLFKTNRKVTVKQLKEDYFKKIECFDSVEISGVEDRFNASLGTYHDLLKIIKDKDFLDNEENEDILEDIVLTLTLFEDREMIEERLK |
| | linker | TYAHLFDDKVMKQLKRRRYTGWGRLSRKLINGIRDKQSGKTILDFLKSDGFANRNFMQLIHDDSLTFKEDIQKAQVSGQGDSLHEHIANLA |
| | and | GSPAIKKGILQTVKVVDELVKVMGRHKPENIVIEMARENQTTQKGQKNSRERMKRIEEGIKELGSQILKEHPVENTQLQNEKLYLYYLQNG |
| | HiBit | RDMYVDQELDINRLSDYDVDHIVPQSFLKDDSIDNKVLTRSDKNRGKSDNVPSEEVVKKMKNYWRQLLNAKLITQRKFDNLTKAERGGLSE |
| | tag | LDKAGFIKRQLVETRQITKHVAQILDSRMNTKYDENDKLIREVKVITLKSKLVSDFRKDFQFYKVREINNYHHAHDAYLNAVVGTALIKKY |
| | (mRNA | PKLESEFVYGDYKVYDVRKMIAKSEQEIGKATAKYFFYSNIMNFFKTEITLANGEIRKRPLIETNGETGEIVWDKGRDFATVRKVLSMPQV |
| | R)- | NIVKKTEVQTGGFSKESILPKRNSDKLIARKKDWDPKKYGGFDSPTVAYSVLVVAKVEKGKSKKLKSVKELLGITIMERSSFEKNPIDFLE |
| | amino | AKGYKEVKKDLIIKLPKYSLFELENGRKRMLASAGELQKGNELALPSKYVNFLYLASHYEKLKGSPEDNEQKQLFVEQHKHYLDEIIEQIS |
| | acid | EFSKRVILADANLDKVLSAYNKHRDKPIREQAENIIHLFTLTNLGAPAAFKYFDTTIDKKRYTSTKEVLDATLIHQSITGLYETRIDLSQL |
| | sequence | GGDGAPESATESGGTSTESEGSAGTSTESEGSAGSAGSTSGSSSGAAFKPNPINYILGLDIGIASVGWAMVEIDEEENPIRLIDLGVRVFE |
| | | RAEVPKTGDSLAMARRLARSVRRLTRRRAHRLLRARRLLKREGVLQAADFDENGLIKSLPNTPWQLRAAALDRKLTPLEWSAVLLHLIKHR |
| | | GYLSQRKNEGETADKELGALLKGVANNAHALQTGDFRTPAELALNKFEKESGHIRNQRGDYSHTFSRKDLQAELILLFEKQKEFGNPHVSG |
| | | GLKEGIETLLMTQRPALSGDAVQKMLGHCTFEPAEPKAAKNTYTAERFIWLTKLNNLRILEQGSERPLTDTERATLMDEPYRKSKLTYAQA |
| | | RKLLGLEDTAFFKGLRYGKDNAEASTLMEMKAYHAISRALEKEGLKDKKSPLNLSSELQDEIGTAFSLFKTDEDITGRLKDRVQPEILEAL |
| | | LKHISFDKFVQISLKALRRIVPLMEQGKRYDEACAEIYGDHYGKKNTEEKIYLPPIPADEIRNPVVLRALSQARKVINGVVRRYGSPARIH |
| | | IETAREVGKSFKDRKEIEKRQEENRKDREKAAAKFREYFPNFVGEPKSKDILKLRLYEQQHGKCLYSGKEINLVRLNEKGYVEIDHALPFS |
| | | RTWDDSFNNKVLVLGSENQNKGNQTPYEYFNGKDNSREWQEFKARVETSRFPRSKKQRILLQKFDEDGFKECNLNDTRYVNRFLCQFVADH |
| | | ILLTGKGKRRVFASNGQITNLLRGFWGLRKVRAENDRHHALDAVVVACSTVAMQQKITRFVRYKEMNAFDGKTIDKETGKVLHQKTHFPQP |
| | | WEFFAQEVMIRVFGKPDGKPEFEEADTPEKLRTLLAEKLSSRPEAVHEYVTPLFVSRAPNRKMSGAHKDTLRSAKRFVKHNEKISVKRVWL |
| | | TEIKLADLENMVNYKNGREIELYEALKARLEAYGGNAKQAFDPKDNPFYKKGGQLVKAVRVEKTQESGVLLNKKNAYTIADNGDMVRVDVF |
| | | CKVDKKGKNQYFIVPIYAWQVAENILPDIDCKGYRIDDSYTFCFSLHKYDLIAFQKDEKSKVEFAYYINCDSSNGRFYLAWHDKGSKEQQF |
| | | RISTQNLVLIQKYQVNELGKEIRPCRLKKRPPVRSGKRTADGSGGGSPKKKRKVSESATPESVSGWRLFKKIS* |
| 66 | Cas9- | AUGGACAAGAAGUACUCCAUCGGCCUGGACAUCGGCACCAACUCCGUGGGCUGGGCCGUGAUCACCGACGAGUACAAGGUGCCCUCCAAGA |
| | Cas9 | AGUUCAAGGUGCUGGGCAACACCGACCGGCACUCCAUCAAGAAGAACCUGAUCGGCGCCCUGCUGUUCGACUCCGGCGAGACCGCCGAGGC |
| | fusion- | CACCCGGCUGAAGCGGACCGCCCGGCGGCGGUACACCCGGCGGAAGAACCGGAUCUGCUACCUGCAGGAGAUCUUCUCCAACGAGAUGGCC |
| | 41 | AAGGUGGACGACUCCUUCUUCCACCGGCUGGAGGAGUCCUUCCUGGUGGAGGAGGACAAGAAGCACGAGCGGCACCCCAUCUUCGGCAACA |
| | amino | UCGUGGACGAGGUGGCCUACCACGAGAAGUACCCCACCAUCUACCACCUGCGGAAGAAGCUGGUGGACUCCACCGACAAGGCCGACCUGCG |
| | acid | GCUGAUCUACCUGGCCCUGGCCCACAUGAUCAAGUUCCGGGGCCACUUCCUGAUCGAGGGCGACCUGAACCCCGACAACUCCGACGUGGAC |
| | residual | AAGCUGUUCAUCCAGCUGGUGCAGACCUACAACCAGCUGUUCGAGGAGAACCCCAUCAACGCCUCCGGCGUGGACGCCAAGGCCAUCCUGU |
| | linker | CCGCCCGGCUGUCCAAGUCCCGGCGGCUGGAGAACCUGAUCGCCCAGCUGCCCGGCGAGAAGAAGAACGGCCUGUUCGGCAACCUGAUCGC |
| | (mRNA | CCUGUCCCUGGGCCUGACCCCCAACUUCAAGUCCAACUUCGACCUGGCCGAGGACGCCAAGCUGCAGCUGUCCAAGGACACCUACGACGAC |
| | R)- | GACCUGGACAACCUGCUGGCCCAGAUCGGCGACCAGUACGCCGACCUGUUCCUGGCCGCCAAGAACCUGUCCGACGCCAUCCUGCUGUCCG |
| | mRNA | ACAUCCUGCGGGUGAACACCGAGAUCACCAAGGCCCCCCUGUCCGCCUCCAUGAUCAAGCGGUACGACGAGCACCACCAGGACCUGACCCU |
| | sequence | GCUGAAGGCCCUGGUGCGGCAGCAGCUGCCCGAGAAGUACAAGGAGAUCUUCUUCGACCAGUCCAAGAACGGCUACGCCGGCUACAUCGAC |
| | | GGCGGCGCCUCCCAGGAGGAGUUCUACAAGUUCAUCAAGCCCAUCCUGGAGAAGAUGGACGGCACCGAGGAGCUGCUGGUGAAGCUGAACC |
| | | GGGAGGACCUGCUGCGGAAGCAGCGGACCUUCGACAACGGCUCCAUCCCCCACCAGAUCCACCUGGGCGAGCUGCACGCCAUCCUGCGGCG |
| | | GCAGGAGGACUUCUACCCCUUCCUGAAGGACAACCGGGAGAAGAUCGAGAAGAUCCUGACCUUCCGGAUCCCCUACUACGUGGGCCCCCUG |
| | | GCCCGGGGCAACUCCCGGUUCGCCUGGAUGACCCGGAAGUCCGAGGAGACCAUCACCCCCUGGAACUUCGAGGAGGUGGUGGACAAGGGCG |
| | | CCUCCGCCCAGUCCUUCAUCGAGCGGAUGACCAACUUCGACAAGAACCUGCCCAACGAGAAGGUGCUGCCCAAGCACUCCCUGCUGUACGA |
| | | GUACUUCACCGUGUACAACGAGCUGACCAAGGUGAAGUACGUGACCGAGGGCAUGCGGAAGCCCGCCUUCCUGUCCGGCGAGCAGAAGAAG |
| | | GCCAUCGUGGACCUGCUGUUCAAGACCAACCGGAAGGUGACCGUGAAGCAGCUGAAGGAGGACUACUUCAAGAAGAUCGAGUGCUUCGACU |
| | | CCGUGGAGAUCUCCGGCGUGGAGGACCGGUUCAACGCCUCCCUGGGCACCUACCACGACCUGCUGAAGAUCAUCAAGGACAAGGACUUCCU |
| | | GGACAACGAGGAGAACGAGGACAUCCUGGAGGACAUCGUGCUGACCCUGACCCUGUUCGAGGACCGGGAGAUGAUCGAGGAGCGGCUGAAG |
| | | ACCUACGCCCACCUGUUCGACGACAAGGUGAUGAAGCAGCUGAAGCGGCGGCGGUACACCGGCUGGGGCCGGCUGUCCCGGAAGCUGAUCA |
| | | ACGGCAUCCGGGACAAGCAGUCCGGCAAGACCAUCCUGGACUUCCUGAAGUCCGACGGCUUCGCCAACCGGAACUUCAUGCAGCUGAUCCA |
| | | CGACGACUCCCUGACCUUCAAGGAGGACAUCCAGAAGGCCCAGGUGUCCGGCCAGGGCGACUCCCUGCACGAGCACAUCGCCAACCUGGCC |
| | | GGCUCCCCCGCCAUCAAGAAGGGCAUCCUGCAGACCGUGAAGGUGGUGGACGAGCUGGUGAAGGUGAUGGGCCGGCACAAGCCCGAGAACA |
| | | UCGUGAUCGAGAUGGCCCGGGAGAACCAGACCACCCAGAAGGGCCAGAAGAACUCCCGGGAGCGGAUGAAGCGGAUCGAGGAGGGCAUCAA |
| | | GGAGCUGGGCUCCCAGAUCCUGAAGGAGCACCCCGUGGAGAACACCCAGCUGCAGAACGAGAAGCUGUACCUGUACUACCUGCAGAACGGC |
| | | CGGGACAUGUACGUGGACCAGGAGCUGGACAUCAACCGGCUGUCCGACUACGACGUGGACCACAUCGUGCCCCAGUCCUUCCUGAAGGACG |
| | | ACUCCAUCGACAACAAGGUGCUGACCCGGUCCGACAAGAACCGGGGCAAGUCCGACAACGUGCCCUCCGAGGAGGUGGUGAAGAAGAUGAA |
| | | GAACUACUGGCGGCAGCUGCUGAACGCCAAGCUGAUCACCCAGCGGAAGUUCGACAACCUGACCAAGGCCGAGCGGGGCGGCCUGUCCGAG |
| | | CUGGACAAGGCCGGCUUCAUCAAGCGGCAGCUGGUGGAGACCCGGCAGAUCACCAAGCACGUGGCCCAGAUCCUGGACUCCCGGAUGAACA |
| | | CCAAGUACGACGAGAACGACAAGCUGAUCCGGGAGGUGAAGGUGAUCACCCUGAAGUCCAAGCUGGUGUCCGACUUCCGGAAGGACUUCCA |
| | | GUUCUACAAGGUGCGGGAGAUCAACAACUACCACCACGCCCACGACGCCUACCUGAACGCCGUGGUGGGCACCGCCCUGAUCAAGAAGUAC |
| | | CCCAAGCUGGAGUCCGAGUUCGUGUACGGCGACUACAAGGUGUACGACGUGCGGAAGAUGAUCGCCAAGUCCGAGCAGGAGAUCGGCAAGG |
| | | CCACCGCCAAGUACUUCUUCUACUCCAACAUCAUGAACUUCUUCAAGACCGAGAUCACCCUGGCCAACGGCGAGAUCCGGAAGCGGCCCCU |
| | | GAUCGAGACCAACGGCGAGACCGGCGAGAUCGUGUGGGACAAGGGCCGGGACUUCGCCACCGUGCGGAAGGUGCUGUCCAUGCCCCAGGUG |
| | | AACAUCGUGAAGAAGACCGAGGUGCAGACCGGCGGCUUCUCCAAGGAGUCCAUCCUGCCCAAGCGGAACUCCGACAAGCUGAUCGCCCGGA |
| | | AGAAGGACUGGGACCCCAAGAAGUACGGCGGCUUCGACUCCCCCACCGUGGCCUACUCCGUGCUGGUGGUGGCCAAGGUGGAGAAGGGCAA |
| | | GUCCAAGAAGCUGAAGUCCGUGAAGGAGCUGCUGGGCAUCACCAUCAUGGAGCGGUCCUCCUUCGAGAAGAACCCCAUCGACUUCCUGGAG |
| | | GCCAAGGGCUACAAGGAGGUGAAGAAGGACCUGAUCAUCAAGCUGCCCAAGUACUCCCUGUUCGAGCUGGAGAACGGCCGGAAGCGGAUGC |
| | | UGGCCUCCGCCGGCGAGCUGCAGAAGGGCAACGAGCUGGCCCUGCCCUCCAAGUACGUGAACUUCCUGUACCUGGCCUCCCACUACGAGAA |
| | | GCUGAAGGGCUCCCCCGAGGACAACGAGCAGAAGCAGCUGUUCGUGGAGCAGCACAAGCACUACCUGGACGAGAUCAUCGAGCAGAUCUCC |
| | | GAGUUCUCCAAGCGGGUGAUCCUGGCCGACGCCAACCUGGACAAGGUGCUGUCCGCCUACAACAAGCACCGGGACAAGCCCAUCCGGGAGC |
| | | AGGCCGAGAACAUCAUCCACCUGUUCACCCUGACCAACCUGGGCGCCCCCGCCGCCUUCAAGUACUUCGACACCACCAUCGACAAGAAGCG |
| | | GUACACCUCCACCAAGGAGGUGCUGGACGCCACCCUGAUCCACCAGUCCAUCACCGGCCUGUACGAGACCCGGAUCGACCUGUCCCAGCUG |
| | | GGCGGCGACGGCGCCCCCGAGUCCGCCACCGAGUCCGGCGGCACCUCCACCGAGUCCGAGGGCUCCGCCGGCACCUCCACCGAGUCCGAGG |
| | | GCUCCGCCGGCUCCGCCGGCUCCACCUCCGGCUCCUCCUCCGGUGCCGCCUUCAAGCCCAACCCCAUCAACUACAUCCUGGGCCUGGACAU |
| | | CGGCAUCGCCUCCGUGGGCUGGGCCAUGGUGGAGAUCGACGAGGAGGAGAACCCCAUCCGGCUGAUCGACCUGGGCGUGCGGGUGUUCGAG |
| | | CGGGCCGAGGUGCCCAAGACCGGCGACUCCCUGGCCAUGGCCCGGCGGCUGGCCCGGUCCGUGCGGCGGCUGACCCGGCGGCGGGCCCACC |
| | | GGCUGCUGCGGGCCCGGCGGCUGCUGAAGCGGGAGGGCGUGCUGCAGGCCGCCGACUUCGACGAGAACGGCCUGAUCAAGUCCCUGCCCAA |
| | | CACCCCCUGGCAGCUGCGGGCCGCCGCCCUGGACCGGAAGCUGACCCCCCUGGAGUGGUCCGCCGUGCUGCUGCACCUGAUCAAGCACCGG |
| | | GGCUACCUGUCCCAGCGGAAGAACGAGGGCGAGACCGCCGACAAGGAGCUGGGCGCCCUGCUGAAGGGCGUGGCCAACAACGCCCACGCCC |
| | | UGCAGACCGGCGACUUCCGGACCCCCGCCGAGCUGGCCCUGAACAAGUUCGAGAAGGAGUCCGGCCACAUCCGGAACCAGCGGGGCGACUA |
| | | CUCCCACACCUUCUCCCGGAAGGACCUGCAGGCCGAGCUGAUCCUGCUGUUCGAGAAGCAGAAGGAGUUCGGCAACCCCCACGUGUCCGGC |
| | | GGCCUGAAGGAGGGCAUCGAGACCCUGCUGAUGACCCAGCGGCCCGCCCUGUCCGGCGACGCCGUGCAGAAGAUGCUGGGCCACUGCACCU |
| | | UCGAGCCCGCCGAGCCCAAGGCCGCCAAGAACACCUACACCGCCGAGCGGUUCAUCUGGCUGACCAAGCUGAACAACCUGCGGAUCCUGGA |
| | | GCAGGGCUCCGAGCGGCCCCUGACCGACACCGAGCGGGCCACCCUGAUGGACGAGCCCUACCGGAAGUCCAAGCUGACCUACGCCCAGGCC |
| | | CGGAAGCUGCUGGGCCUGGAGGACACCGCCUUCUUCAAGGGCCUGCGGUACGGCAAGGACAACGCCGAGGCCUCCACCCUGAUGGAGAUGA |
| | | AGGCCUACCACGCCAUCUCCCGGGCCCUGGAGAAGGAGGGCCUGAAGGACAAGAAGUCCCCCCUGAACCUGUCCUCCGAGCUGCAGGACGA |
| | | GAUCGGCACCGCCUUCUCCCUGUUCAAGACCGACGAGGACAUCACCGGCCGGCUGAAGGACCGGGUGCAGCCCGAGAUCCUGGAGGCCCUG |
| | | CUGAAGCACAUCUCCUUCGACAAGUUCGUGCAGAUCUCCCUGAAGGCCCUGCGGCGGAUCGUGCCCCUGAUGGAGCAGGGCAAGCGGUACG |
| | | ACGAGGCCUGCGCCGAGAUCUACGGCGACCACUACGGCAAGAAGAACACCGAGGAGAAGAUCUACCUGCCCCCCAUCCCCGCCGACGAGAU |
| | | CCGGAACCCCGUGGUGCUGCGGGCCCUGUCCCAGGCCCGGAAGGUGAUCAACGGCGUGGUGCGGCGGUACGGCUCCCCCGCCCGGAUCCAC |
| | | AUCGAGACCGCCCGGGAGGUGGGCAAGUCCUUCAAGGACCGGAAGGAGAUCGAGAAGCGGCAGGAGGAGAACCGGAAGGACCGGGAGAAGG |
| | | CCGCCGCCAAGUUCCGGGAGUACUUCCCCAACUUCGUGGGCGAGCCCAAGUCCAAGGACAUCCUGAAGCUGCGGCUGUACGAGCAGCAGCA |
| | | CGGCAAGUGCCUGUACUCCGGCAAGGAGAUCAACCUGGUGCGGCUGAACGAGAAGGGCUACGUGGAGAUCGACCACGCCCUGCCCUUCUCC |
| | | CGGACCUGGGACGACUCCUUCAACAACAAGGUGCUGGUGCUGGGCUCCGAGAACCAGAACAAGGGCAACCAGACCCCCUACGAGUACUUCA |
| | | ACGGCAAGGACAACUCCCGGGAGUGGCAGGAGUUCAAGGCCCGGGUGGAGACCUCCCGGUUCCCCCGGUCCAAGAAGCAGCGGAUCCUGCU |
| | | GCAGAAGUUCGACGAGGACGGCUUCAAGGAGUGCAACCUGAACGACACCCGGUACGUGAACCGCUUCCUGUGCCAGUUCGUGGCCGACCAC |
| | | AUCCUGCUGACCGGCAAGGGCAAGCGGCGGGUGUUCGCCUCCAACGGCCAGAUCACCAACCUGCUGCGGGGCUUCUGGGGCCUGCGGAAGG |
| | | UGCGGGCCGAGAACGACCGGCACCACGCCCUGGACGCCGUGGUGGUGGCCUGCUCCACCGUGGCCAUGCAGCAGAAGAUCACCCGGUUCGU |
| | | GCGGUACAAGGAGAUGAACGCCUUCGACGGCAAGACCAUCGACAAGGAGACCGGCAAGGUGCUGCACCAGAAGACCCACUUCCCCCAGCCC |
| | | UGGGAGUUCUUCGCCCAGGAGGUGAUGAUCCGGGUGUUCGGCAAGCCCGACGGCAAGCCCGAGUUCGAGGAGGCCGACACCCCCGAGAAGC |
| | | UGCGGACCCUGCUGGCCGAGAAGCUGUCCUCCCGGCCCGAGGCCGUGCACGAGUACGUGACCCCCCUGUUCGUGUCCCGGGCCCCCAACCG |
| | | GAAGAUGUCCGGCGCCCACAAGGACACCCUGCGGUCCGCCAAGCGGUUCGUGAAGCACAACGAGAAGAUCUCCGUGAAGCGGGUGUGGCUG |
| | | ACCGAGAUCAAGCUGGCCGACCUGGAGAACAUGGUGAACUACAAGAACGGCCGGGAGAUCGAGCUGUACGAGGCCCUGAAGGCCCGGCUGG |
| | | AGGCCUACGGCGGCAACGCCAAGCAGGCCUUCGACCCCAAGGACAACCCCUUCUACAAGAAGGGCGGCCAGCUGGUGAAGGCCGUGCGGGU |
| | | GGAGAAGACCCAGGAGUCCGGCGUGCUGCUGAACAAGAAGAACGCCUACACCAUCGCCGACAACGGCGACAUGGUGCGGGUGGACGUGUUC |
| | | UGCAAGGUGGACAAGAAGGGCAAGAACCAGUACUUCAUCGUGCCCAUCUACGCCUGGCAGGUGGCCGAGAACAUCCUGCCCGACAUCGACU |
| | | GCAAGGGCUACCGGAUCGACGACUCCUACACCUUCUGCUUCUCCCUGCACAAGUACGACCUGAUCGCCUUCCAGAAGGACGAGAAGUCCAA |
| | | GGUGGAGUUCGCCUACUACAUCAACUGCGACUCCUCCAACGGCCGGUUCUACCUGGCCUGGCACGACAAGGGCUCCAAGGAGCAGCAGUUC |
| | | CGGAUCUCCACCCAGAACCUGGUGCUGAUCCAGAAGUACCAGGUGAACGAGCUGGGCAAGGAGAUCCGGCCCUGCCGGCUGAAGAAGCGGC |
| | | CCCCCGUGCGGUCCGGAAAGCGGACCGCCGACGGCUCCGGAGGAGGAAGCCCGAAGAAGAAGAGAAAGGUCUAG |
| 67 | Cas9- | MDKKYSIGLDIGTNSVGWAVITDEYKVPSKKFKVLGNTDRHSIKKNLIGALLFDSGETAEATRLKRTARRRYTRRKNRICYLQEIFSNEMA |
| | Cas9 | KVDDSFFHRLEESFLVEEDKKHERHPIFGNIVDEVAYHEKYPTIYHLRKKLVDSTDKADLRLIYLALAHMIKFRGHFLIEGDLNPDNSDVD |
| | fusion- | KLFIQLVQTYNQLFEENPINASGVDAKAILSARLSKSRRLENLIAQLPGEKKNGLFGNLIALSLGLTPNFKSNFDLAEDAKLQLSKDTYDD |
| | 41 | DLDNLLAQIGDQYADLFLAAKNLSDAILLSDILRVNTEITKAPLSASMIKRYDEHHQDLTLLKALVRQQLPEKYKEIFFDQSKNGYAGYID |
| | amino | GGASQEEFYKFIKPILEKMDGTEELLVKLNREDLLRKQRTFDNGSIPHQIHLGELHAILRRQEDFYPFLKDNREKIEKILTFRIPYYVGPL |
| | acid | ARGNSRFAWMTRKSEETITPWNFEEVVDKGASAQSFIERMTNFDKNLPNEKVLPKHSLLYEYFTVYNELTKVKYVTEGMRKPAFLSGEQKK |
| | residual | AIVDLLFKTNRKVTVKQLKEDYFKKIECFDSVEISGVEDRFNASLGTYHDLLKIIKDKDFLDNEENEDILEDIVLTLTLFEDREMIEERLK |
| | linker | TYAHLFDDKVMKQLKRRRYTGWGRLSRKLINGIRDKQSGKTILDFLKSDGFANRNFMQLIHDDSLTFKEDIQKAQVSGQGDSLHEHIANLA |
| | (mRNA | GSPAIKKGILQTVKVVDELVKVMGRHKPENIVIEMARENQTTQKGQKNSRERMKRIEEGIKELGSQILKEHPVENTQLQNEKLYLYYLQNG |
| | R)- | RDMYVDQELDINRLSDYDVDHIVPQSFLKDDSIDNKVLTRSDKNRGKSDNVPSEEVVKKMKNYWRQLLNAKLITQRKFDNLTKAERGGLSE |
| | mRNA | LDKAGFIKRQLVETRQITKHVAQILDSRMNTKYDENDKLIREVKVITLKSKLVSDFRKDFQFYKVREINNYHHAHDAYLNAVVGTALIKKY |
| | sequence | PKLESEFVYGDYKVYDVRKMIAKSEQEIGKATAKYFFYSNIMNFFKTEITLANGEIRKRPLIETNGETGEIVWDKGRDFATVRKVLSMPQV |
| | | NIVKKTEVQTGGFSKESILPKRNSDKLIARKKDWDPKKYGGFDSPTVAYSVLVVAKVEKGKSKKLKSVKELLGITIMERSSFEKNPIDFLE |
| | | AKGYKEVKKDLIIKLPKYSLFELENGRKRMLASAGELQKGNELALPSKYVNFLYLASHYEKLKGSPEDNEQKQLFVEQHKHYLDEIIEQIS |
| | | EFSKRVILADANLDKVLSAYNKHRDKPIREQAENIIHLFTLTNLGAPAAFKYFDTTIDKKRYTSTKEVLDATLIHQSITGLYETRIDLSQL |
| | | GGDGAPESATESGGTSTESEGSAGTSTESEGSAGSAGSTSGSSSGAAFKPNPINYILGLDIGIASVGWAMVEIDEEENPIRLIDLGVRVFE |
| | | RAEVPKTGDSLAMARRLARSVRRLTRRRAHRLLRARRLLKREGVLQAADFDENGLIKSLPNTPWQLRAAALDRKLTPLEWSAVLLHLIKHR |
| | | GYLSQRKNEGETADKELGALLKGVANNAHALQTGDFRTPAELALNKFEKESGHIRNQRGDYSHTFSRKDLQAELILLFEKQKEFGNPHVSG |
| | | GLKEGIETLLMTQRPALSGDAVQKMLGHCTFEPAEPKAAKNTYTAERFIWLTKLNNLRILEQGSERPLTDTERATLMDEPYRKSKLTYAQA |
| | | RKLLGLEDTAFFKGLRYGKDNAEASTLMEMKAYHAISRALEKEGLKDKKSPLNLSSELQDEIGTAFSLFKTDEDITGRLKDRVQPEILEAL |
| | | LKHISFDKFVQISLKALRRIVPLMEQGKRYDEACAEIYGDHYGKKNTEEKIYLPPIPADEIRNPVVLRALSQARKVINGVVRRYGSPARIH |
| | | IETAREVGKSFKDRKEIEKRQEENRKDREKAAAKFREYFPNFVGEPKSKDILKLRLYEQQHGKCLYSGKEINLVRLNEKGYVEIDHALPFS |
| | | RTWDDSFNNKVLVLGSENQNKGNQTPYEYFNGKDNSREWQEFKARVETSRFPRSKKQRILLQKFDEDGFKECNLNDTRYVNRFLCQFVADH |
| | | ILLTGKGKRRVFASNGQITNLLRGFWGLRKVRAENDRHHALDAVVVACSTVAMQQKITRFVRYKEMNAFDGKTIDKETGKVLHQKTHFPQP |
| | | WEFFAQEVMIRVFGKPDGKPEFEEADTPEKLRTLLAEKLSSRPEAVHEYVTPLFVSRAPNRKMSGAHKDTLRSAKRFVKHNEKISVKRVWL |
| | | TEIKLADLENMVNYKNGREIELYEALKARLEAYGGNAKQAFDPKDNPFYKKGGQLVKAVRVEKTQESGVLLNKKNAYTIADNGDMVRVDVF |
| | | CKVDKKGKNQYFIVPIYAWQVAENILPDIDCKGYRIDDSYTFCFSLHKYDLIAFQKDEKSKVEFAYYINCDSSNGRFYLAWHDKGSKEQQF |
| | | RISTQNLVLIQKYQVNELGKEIRPCRLKKRPPVRSGKRTADGSGGGSPKKKRKV* |
| 68 | Cas9- | GGGAAGCUCAGAAUAAACGCUCAACUUUGGCCGGAUCUGCCACCAUGGACAAGAAGUACUCCAUCGGCCUGGACAUCGGCACCAACUCCGU |
| | Cas9 | GGGCUGGGCCGUGAUCACCGACGAGUACAAGGUGCCCUCCAAGAAGUUCAAGGUGCUGGGCAACACCGACCGGCACUCCAUCAAGAAGAAC |
| | fusion- | CUGAUCGGCGCCCUGCUGUUCGACUCCGGCGAGACCGCCGAGGCCACCCGGCUGAAGCGGACCGCCCGGCGGCGGUACACCCGGCGGAAGA |
| | 31 | ACCGGAUCUGCUACCUGCAGGAGAUCUUCUCCAACGAGAUGGCCAAGGUGGACGACUCCUUCUUCCACCGGCUGGAGGAGUCCUUCCUGGU |
| | amino | GGAGGAGGACAAGAAGCACGAGCGGCACCCCAUCUUCGGCAACAUCGUGGACGAGGUGGCCUACCACGAGAAGUACCCCACCAUCUACCAC |
| | acid | CUGCGGAAGAAGCUGGUGGACUCCACCGACAAGGCCGACCUGCGGCUGAUCUACCUGGCCCUGGCCCACAUGAUCAAGUUCCGGGGCCACU |
| | residue | UCCUGAUCGAGGGCGACCUGAACCCCGACAACUCCGACGUGGACAAGCUGUUCAUCCAGCUGGUGCAGACCUACAACCAGCUGUUCGAGGA |
| | linker | GAACCCCAUCAACGCCUCCGGCGUGGACGCCAAGGCCAUCCUGUCCGCCCGGCUGUCCAAGUCCCGGCGGCUGGAGAACCUGAUCGCCCAG |
| | and | CUGCCCGGCGAGAAGAAGAACGGCCUGUUCGGCAACCUGAUCGCCCUGUCCCUGGGCCUGACCCCCAACUUCAAGUCCAACUUCGACCUGG |
| | HiBit | CCGAGGACGCCAAGCUGCAGCUGUCCAAGGACACCUACGACGACGACCUGGACAACCUGCUGGCCCAGAUCGGCGACCAGUACGCCGACCU |
| | tag | GUUCCUGGCCGCCAAGAACCUGUCCGACGCCAUCCUGCUGUCCGACAUCCUGCGGGUGAACACCGAGAUCACCAAGGCCCCCCUGUCCGCC |
| | (mRNA | UCCAUGAUCAAGCGGUACGACGAGCACCACCAGGACCUGACCCUGCUGAAGGCCCUGGUGCGGCAGCAGCUGCCCGAGAAGUACAAGGAGA |
| | S)- | UCUUCUUCGACCAGUCCAAGAACGGCUACGCCGGCUACAUCGACGGCGGCGCCUCCCAGGAGGAGUUCUACAAGUUCAUCAAGCCCAUCCU |
| | mRNA | GGAGAAGAUGGACGGCACCGAGGAGCUGCUGGUGAAGCUGAACCGGGAGGACCUGCUGCGGAAGCAGCGGACCUUCGACAACGGCUCCAUC |
| | sequence | CCCCACCAGAUCCACCUGGGCGAGCUGCACGCCAUCCUGCGGCGGCAGGAGGACUUCUACCCCUUCCUGAAGGACAACCGGGAGAAGAUCG |
| | | AGAAGAUCCUGACCUUCCGGAUCCCCUACUACGUGGGCCCCCUGGCCCGGGGCAACUCCCGGUUCGCCUGGAUGACCCGGAAGUCCGAGGA |
| | | GACCAUCACCCCCUGGAACUUCGAGGAGGUGGUGGACAAGGGCGCCUCCGCCCAGUCCUUCAUCGAGCGGAUGACCAACUUCGACAAGAAC |
| | | CUGCCCAACGAGAAGGUGCUGCCCAAGCACUCCCUGCUGUACGAGUACUUCACCGUGUACAACGAGCUGACCAAGGUGAAGUACGUGACCG |
| | | AGGGCAUGCGGAAGCCCGCCUUCCUGUCCGGCGAGCAGAAGAAGGCCAUCGUGGACCUGCUGUUCAAGACCAACCGGAAGGUGACCGUGAA |
| | | GCAGCUGAAGGAGGACUACUUCAAGAAGAUCGAGUGCUUCGACUCCGUGGAGAUCUCCGGCGUGGAGGACCGGUUCAACGCCUCCCUGGGC |
| | | ACCUACCACGACCUGCUGAAGAUCAUCAAGGACAAGGACUUCCUGGACAACGAGGAGAACGAGGACAUCCUGGAGGACAUCGUGCUGACCC |
| | | UGACCCUGUUCGAGGACCGGGAGAUGAUCGAGGAGCGGCUGAAGACCUACGCCCACCUGUUCGACGACAAGGUGAUGAAGCAGCUGAAGCG |
| | | GCGGCGGUACACCGGCUGGGGCCGGCUGUCCCGGAAGCUGAUCAACGGCAUCCGGGACAAGCAGUCCGGCAAGACCAUCCUGGACUUCCUG |
| | | AAGUCCGACGGCUUCGCCAACCGGAACUUCAUGCAGCUGAUCCACGACGACUCCCUGACCUUCAAGGAGGACAUCCAGAAGGCCCAGGUGU |
| | | CCGGCCAGGGCGACUCCCUGCACGAGCACAUCGCCAACCUGGCCGGCUCCCCCGCCAUCAAGAAGGGCAUCCUGCAGACCGUGAAGGUGGU |
| | | GGACGAGCUGGUGAAGGUGAUGGGCCGGCACAAGCCCGAGAACAUCGUGAUCGAGAUGGCCCGGGAGAACCAGACCACCCAGAAGGGCCAG |
| | | AAGAACUCCCGGGAGCGGAUGAAGCGGAUCGAGGAGGGCAUCAAGGAGCUGGGCUCCCAGAUCCUGAAGGAGCACCCCGUGGAGAACACCC |
| | | AGCUGCAGAACGAGAAGCUGUACCUGUACUACCUGCAGAACGGCCGGGACAUGUACGUGGACCAGGAGCUGGACAUCAACCGGCUGUCCGA |
| | | CUACGACGUGGACCACAUCGUGCCCCAGUCCUUCCUGAAGGACGACUCCAUCGACAACAAGGUGCUGACCCGGUCCGACAAGAACCGGGGC |
| | | AAGUCCGACAACGUGCCCUCCGAGGAGGUGGUGAAGAAGAUGAAGAACUACUGGCGGCAGCUGCUGAACGCCAAGCUGAUCACCCAGCGGA |
| | | AGUUCGACAACCUGACCAAGGCCGAGCGGGGCGGCCUGUCCGAGCUGGACAAGGCCGGCUUCAUCAAGCGGCAGCUGGUGGAGACCCGGCA |
| | | GAUCACCAAGCACGUGGCCCAGAUCCUGGACUCCCGGAUGAACACCAAGUACGACGAGAACGACAAGCUGAUCCGGGAGGUGAAGGUGAUC |
| | | ACCCUGAAGUCCAAGCUGGUGUCCGACUUCCGGAAGGACUUCCAGUUCUACAAGGUGCGGGAGAUCAACAACUACCACCACGCCCACGACG |
| | | CCUACCUGAACGCCGUGGUGGGCACCGCCCUGAUCAAGAAGUACCCCAAGCUGGAGUCCGAGUUCGUGUACGGCGACUACAAGGUGUACGA |
| | | CGUGCGGAAGAUGAUCGCCAAGUCCGAGCAGGAGAUCGGCAAGGCCACCGCCAAGUACUUCUUCUACUCCAACAUCAUGAACUUCUUCAAG |
| | | ACCGAGAUCACCCUGGCCAACGGCGAGAUCCGGAAGCGGCCCCUGAUCGAGACCAACGGCGAGACCGGCGAGAUCGUGUGGGACAAGGGCC |
| | | GGGACUUCGCCACCGUGCGGAAGGUGCUGUCCAUGCCCCAGGUGAACAUCGUGAAGAAGACCGAGGUGCAGACCGGCGGCUUCUCCAAGGA |
| | | GUCCAUCCUGCCCAAGCGGAACUCCGACAAGCUGAUCGCCCGGAAGAAGGACUGGGACCCCAAGAAGUACGGCGGCUUCGACUCCCCCACC |
| | | GUGGCCUACUCCGUGCUGGUGGUGGCCAAGGUGGAGAAGGGCAAGUCCAAGAAGCUGAAGUCCGUGAAGGAGCUGCUGGGCAUCACCAUCA |
| | | UGGAGCGGUCCUCCUUCGAGAAGAACCCCAUCGACUUCCUGGAGGCCAAGGGCUACAAGGAGGUGAAGAAGGACCUGAUCAUCAAGCUGCC |
| | | CAAGUACUCCCUGUUCGAGCUGGAGAACGGCCGGAAGCGGAUGCUGGCCUCCGCCGGCGAGCUGCAGAAGGGCAACGAGCUGGCCCUGCCC |
| | | UCCAAGUACGUGAACUUCCUGUACCUGGCCUCCCACUACGAGAAGCUGAAGGGCUCCCCCGAGGACAACGAGCAGAAGCAGCUGUUCGUGG |
| | | AGCAGCACAAGCACUACCUGGACGAGAUCAUCGAGCAGAUCUCCGAGUUCUCCAAGCGGGUGAUCCUGGCCGACGCCAACCUGGACAAGGU |
| | | GCUGUCCGCCUACAACAAGCACCGGGACAAGCCCAUCCGGGAGCAGGCCGAGAACAUCAUCCACCUGUUCACCCUGACCAACCUGGGCGCC |
| | | CCCGCCGCCUUCAAGUACUUCGACACCACCAUCGACAAGAAGCGGUACACCUCCACCAAGGAGGUGCUGGACGCCACCCUGAUCCACCAGU |
| | | CCAUCACCGGCCUGUACGAGACCCGGAUCGACCUGUCCCAGCUGGGGGGCGACGGCGCCCCCGAGUCCGCCACCGAGUCCGGCGGCACCUC |
| | | CACCGAGUCCGAGGGCUCCGCCGGCACCUCCACCGAGUCCGAGGGCUCCUCCUCCGGUGCCGCCUUCAAGCCCAACCCCAUCAACUACAUC |
| | | CUGGGCCUGGACAUCGGCAUCGCCUCCGUGGGCUGGGCCAUGGUGGAGAUCGACGAGGAGGAGAACCCCAUCCGGCUGAUCGACCUGGGCG |
| | | UGCGGGUGUUCGAGCGGGCCGAGGUGCCCAAGACCGGCGACUCCCUGGCCAUGGCCCGGCGGCUGGCCCGGUCCGUGCGGCGGCUGACCCG |
| | | GCGGCGGGCCCACCGGCUGCUGCGGGCCCGGCGGCUGCUGAAGCGGGAGGGCGUGCUGCAGGCCGCCGACUUCGACGAGAACGGCCUGAUC |
| | | AAGUCCCUGCCCAACACCCCCUGGCAGCUGCGGGCCGCCGCCCUGGACCGGAAGCUGACCCCCCUGGAGUGGUCCGCCGUGCUGCUGCACC |
| | | UGAUCAAGCACCGGGGCUACCUGUCCCAGCGGAAGAACGAGGGCGAGACCGCCGACAAGGAGCUGGGCGCCCUGCUGAAGGGCGUGGCCAA |
| | | CAACGCCCACGCCCUGCAGACCGGCGACUUCCGGACCCCCGCCGAGCUGGCCCUGAACAAGUUCGAGAAGGAGUCCGGCCACAUCCGGAAC |
| | | CAGCGGGGCGACUACUCCCACACCUUCUCCCGGAAGGACCUGCAGGCCGAGCUGAUCCUGCUGUUCGAGAAGCAGAAGGAGUUCGGCAACC |
| | | CCCACGUGUCCGGCGGCCUGAAGGAGGGCAUCGAGACCCUGCUGAUGACCCAGCGGCCCGCCCUGUCCGGCGACGCCGUGCAGAAGAUGCU |
| | | GGGCCACUGCACCUUCGAGCCCGCCGAGCCCAAGGCCGCCAAGAACACCUACACCGCCGAGCGGUUCAUCUGGCUGACCAAGCUGAACAAC |
| | | CUGCGGAUCCUGGAGCAGGGCUCCGAGCGGCCCCUGACCGACACCGAGCGGGCCACCCUGAUGGACGAGCCCUACCGGAAGUCCAAGCUGA |
| | | CCUACGCCCAGGCCCGGAAGCUGCUGGGCCUGGAGGACACCGCCUUCUUCAAGGGCCUGCGGUACGGCAAGGACAACGCCGAGGCCUCCAC |
| | | CCUGAUGGAGAUGAAGGCCUACCACGCCAUCUCCCGGGCCCUGGAGAAGGAGGGCCUGAAGGACAAGAAGUCCCCCCUGAACCUGUCCUCC |
| | | GAGCUGCAGGACGAGAUCGGCACCGCCUUCUCCCUGUUCAAGACCGACGAGGACAUCACCGGCCGGCUGAAGGACCGGGUGCAGCCCGAGA |
| | | UCCUGGAGGCCCUGCUGAAGCACAUCUCCUUCGACAAGUUCGUGCAGAUCUCCCUGAAGGCCCUGCGGCGGAUCGUGCCCCUGAUGGAGCA |
| | | GGGCAAGCGGUACGACGAGGCCUGCGCCGAGAUCUACGGCGACCACUACGGCAAGAAGAACACCGAGGAGAAGAUCUACCUGCCCCCCAUC |
| | | CCCGCCGACGAGAUCCGGAACCCCGUGGUGCUGCGGGCCCUGUCCCAGGCCCGGAAGGUGAUCAACGGCGUGGUGCGGCGGUACGGCUCCC |
| | | CCGCCCGGAUCCACAUCGAGACCGCCCGGGAGGUGGGCAAGUCCUUCAAGGACCGGAAGGAGAUCGAGAAGCGGCAGGAGGAGAACCGGAA |
| | | GGACCGGGAGAAGGCCGCCGCCAAGUUCCGGGAGUACUUCCCCAACUUCGUGGGCGAGCCCAAGUCCAAGGACAUCCUGAAGCUGCGGCUG |
| | | UACGAGCAGCAGCACGGCAAGUGCCUGUACUCCGGCAAGGAGAUCAACCUGGUGCGGCUGAACGAGAAGGGCUACGUGGAGAUCGACCACG |
| | | CCCUGCCCUUCUCCCGGACCUGGGACGACUCCUUCAACAACAAGGUGCUGGUGCUGGGCUCCGAGAACCAGAACAAGGGCAACCAGACCCC |
| | | CUACGAGUACUUCAACGGCAAGGACAACUCCCGGGAGUGGCAGGAGUUCAAGGCCCGGGUGGAGACCUCCCGGUUCCCCCGGUCCAAGAAG |
| | | CAGCGGAUCCUGCUGCAGAAGUUCGACGAGGACGGCUUCAAGGAGUGCAACCUGAACGACACCCGGUACGUGAACCGCUUCCUGUGCCAGU |
| | | UCGUGGCCGACCACAUCCUGCUGACCGGCAAGGGCAAGCGGCGGGUGUUCGCCUCCAACGGCCAGAUCACCAACCUGCUGCGGGGCUUCUG |
| | | GGGCCUGCGGAAGGUGCGGGCCGAGAACGACCGGCACCACGCCCUGGACGCCGUGGUGGUGGCCUGCUCCACCGUGGCCAUGCAGCAGAAG |
| | | AUCACCCGGUUCGUGCGGUACAAGGAGAUGAACGCCUUCGACGGCAAGACCAUCGACAAGGAGACCGGCAAGGUGCUGCACCAGAAGACCC |
| | | ACUUCCCCCAGCCCUGGGAGUUCUUCGCCCAGGAGGUGAUGAUCCGGGUGUUCGGCAAGCCCGACGGCAAGCCCGAGUUCGAGGAGGCCGA |
| | | CACCCCCGAGAAGCUGCGGACCCUGCUGGCCGAGAAGCUGUCCUCCCGGCCCGAGGCCGUGCACGAGUACGUGACCCCCCUGUUCGUGUCC |
| | | CGGGCCCCCAACCGGAAGAUGUCCGGCGCCCACAAGGACACCCUGCGGUCCGCCAAGCGGUUCGUGAAGCACAACGAGAAGAUCUCCGUGA |
| | | AGCGGGUGUGGCUGACCGAGAUCAAGCUGGCCGACCUGGAGAACAUGGUGAACUACAAGAACGGCCGGGAGAUCGAGCUGUACGAGGCCCU |
| | | GAAGGCCCGGCUGGAGGCCUACGGCGGCAACGCCAAGCAGGCCUUCGACCCCAAGGACAACCCCUUCUACAAGAAGGGCGGCCAGCUGGUG |
| | | AAGGCCGUGCGGGUGGAGAAGACCCAGGAGUCCGGCGUGCUGCUGAACAAGAAGAACGCCUACACCAUCGCCGACAACGGCGACAUGGUGC |
| | | GGGUGGACGUGUUCUGCAAGGUGGACAAGAAGGGCAAGAACCAGUACUUCAUCGUGCCCAUCUACGCCUGGCAGGUGGCCGAGAACAUCCU |
| | | GCCCGACAUCGACUGCAAGGGCUACCGGAUCGACGACUCCUACACCUUCUGCUUCUCCCUGCACAAGUACGACCUGAUCGCCUUCCAGAAG |
| | | GACGAGAAGUCCAAGGUGGAGUUCGCCUACUACAUCAACUGCGACUCCUCCAACGGCCGGUUCUACCUGGCCUGGCACGACAAGGGCUCCA |
| | | AGGAGCAGCAGUUCCGGAUCUCCACCCAGAACCUGGUGCUGAUCCAGAAGUACCAGGUGAACGAGCUGGGCAAGGAGAUCCGGCCCUGCCG |
| | | GCUGAAGAAGCGGCCCCCCGUGCGGUCCGGAAAGCGGACCGCCGACGGCUCCGGAGGAGGAAGCCCGAAGAAGAAGAGAAAGGUCAGCGAA |
| | | AGCGCAACACCGGAAAGCGUCAGCGGAUGGAGACUGUUCAAGAAGAUCAGCUAGCUAGCACCAGCCUCAAGAACACCCGAAUGGAGUCUCU |
| | | AAGCUACAUAAUACCAACUUACACUUUACAAAAUGUUGUCCCCCAAAAUGUAGCCAUUCGUAUCUGCUCCUAAUAAAAAGAAAGUUUCUUC |
| | | ACAUUCUCUCGAGAAAAAAAAAAAAUGGAAAAAAAAAAAACGGAAAAAAAAAAAAGGUAAAAAAAAAAAAUAUAAAAAAAAAAAACAUAAA |
| | | AAAAAAAAACGAAAAAAAAAAAACGUAAAAAAAAAAAACUCAAAAAAAAAAAAGAUAAAAAAAAAAAACCUAAAAAAAAAAAAUGUAAAAA |
| | | AAAAAAAGGGAAAAAAAAAAAACGCAAAAAAAAAAAACACAAAAAAAAAAAAUGCAAAAAAAAAAAAUCGAAAAAAAAAAAAUCUAAAAAA |
| | | AAAAAACGAAAAAAAAAAAACCCAAAAAAAAAAAAGACAAAAAAAAAAAAUAGAAAAAAAAAAAAGUUAAAAAAAAAAAACUGAAAAAAAA |
| | | AAAAUUUAAAAAAAAAAAAUCUAG |
| 69 | Cas9- | AUGGACAAGAAGUACUCCAUCGGCCUGGACAUCGGCACCAACUCCGUGGGCUGGGCCGUGAUCACCGACGAGUACAAGGUGCCCUCCAAGA |
| | Cas9 | AGUUCAAGGUGCUGGGCAACACCGACCGGCACUCCAUCAAGAAGAACCUGAUCGGCGCCCUGCUGUUCGACUCCGGCGAGACCGCCGAGGC |
| | fusion- | CACCCGGCUGAAGCGGACCGCCCGGCGGCGGUACACCCGGCGGAAGAACCGGAUCUGCUACCUGCAGGAGAUCUUCUCCAACGAGAUGGCC |
| | 31 | AAGGUGGACGACUCCUUCUUCCACCGGCUGGAGGAGUCCUUCCUGGUGGAGGAGGACAAGAAGCACGAGCGGCACCCCAUCUUCGGCAACA |
| | amino | UCGUGGACGAGGUGGCCUACCACGAGAAGUACCCCACCAUCUACCACCUGCGGAAGAAGCUGGUGGACUCCACCGACAAGGCCGACCUGCG |
| | acid | GCUGAUCUACCUGGCCCUGGCCCACAUGAUCAAGUUCCGGGGCCACUUCCUGAUCGAGGGCGACCUGAACCCCGACAACUCCGACGUGGAC |
| | residue | AAGCUGUUCAUCCAGCUGGUGCAGACCUACAACCAGCUGUUCGAGGAGAACCCCAUCAACGCCUCCGGCGUGGACGCCAAGGCCAUCCUGU |
| | linker | CCGCCCGGCUGUCCAAGUCCCGGCGGCUGGAGAACCUGAUCGCCCAGCUGCCCGGCGAGAAGAAGAACGGCCUGUUCGGCAACCUGAUCGC |
| | and | CCUGUCCCUGGGCCUGACCCCCAACUUCAAGUCCAACUUCGACCUGGCCGAGGACGCCAAGCUGCAGCUGUCCAAGGACACCUACGACGAC |
| | HiBit | GACCUGGACAACCUGCUGGCCCAGAUCGGCGACCAGUACGCCGACCUGUUCCUGGCCGCCAAGAACCUGUCCGACGCCAUCCUGCUGUCCG |
| | tag | ACAUCCUGCGGGUGAACACCGAGAUCACCAAGGCCCCCCUGUCCGCCUCCAUGAUCAAGCGGUACGACGAGCACCACCAGGACCUGACCCU |
| | (mRNA | GCUGAAGGCCCUGGUGCGGCAGCAGCUGCCCGAGAAGUACAAGGAGAUCUUCUUCGACCAGUCCAAGAACGGCUACGCCGGCUACAUCGAC |
| | S)-ORF | GGCGGCGCCUCCCAGGAGGAGUUCUACAAGUUCAUCAAGCCCAUCCUGGAGAAGAUGGACGGCACCGAGGAGCUGCUGGUGAAGCUGAACC |
| | sequence | GGGAGGACCUGCUGCGGAAGCAGCGGACCUUCGACAACGGCUCCAUCCCCCACCAGAUCCACCUGGGCGAGCUGCACGCCAUCCUGCGGCG |
| | | GCAGGAGGACUUCUACCCCUUCCUGAAGGACAACCGGGAGAAGAUCGAGAAGAUCCUGACCUUCCGGAUCCCCUACUACGUGGGCCCCCUG |
| | | GCCCGGGGCAACUCCCGGUUCGCCUGGAUGACCCGGAAGUCCGAGGAGACCAUCACCCCCUGGAACUUCGAGGAGGUGGUGGACAAGGGCG |
| | | CCUCCGCCCAGUCCUUCAUCGAGCGGAUGACCAACUUCGACAAGAACCUGCCCAACGAGAAGGUGCUGCCCAAGCACUCCCUGCUGUACGA |
| | | GUACUUCACCGUGUACAACGAGCUGACCAAGGUGAAGUACGUGACCGAGGGCAUGCGGAAGCCCGCCUUCCUGUCCGGCGAGCAGAAGAAG |
| | | GCCAUCGUGGACCUGCUGUUCAAGACCAACCGGAAGGUGACCGUGAAGCAGCUGAAGGAGGACUACUUCAAGAAGAUCGAGUGCUUCGACU |
| | | CCGUGGAGAUCUCCGGCGUGGAGGACCGGUUCAACGCCUCCCUGGGCACCUACCACGACCUGCUGAAGAUCAUCAAGGACAAGGACUUCCU |
| | | GGACAACGAGGAGAACGAGGACAUCCUGGAGGACAUCGUGCUGACCCUGACCCUGUUCGAGGACCGGGAGAUGAUCGAGGAGCGGCUGAAG |
| | | ACCUACGCCCACCUGUUCGACGACAAGGUGAUGAAGCAGCUGAAGCGGCGGCGGUACACCGGCUGGGGCCGGCUGUCCCGGAAGCUGAUCA |
| | | ACGGCAUCCGGGACAAGCAGUCCGGCAAGACCAUCCUGGACUUCCUGAAGUCCGACGGCUUCGCCAACCGGAACUUCAUGCAGCUGAUCCA |
| | | CGACGACUCCCUGACCUUCAAGGAGGACAUCCAGAAGGCCCAGGUGUCCGGCCAGGGCGACUCCCUGCACGAGCACAUCGCCAACCUGGCC |
| | | GGCUCCCCCGCCAUCAAGAAGGGCAUCCUGCAGACCGUGAAGGUGGUGGACGAGCUGGUGAAGGUGAUGGGCCGGCACAAGCCCGAGAACA |
| | | UCGUGAUCGAGAUGGCCCGGGAGAACCAGACCACCCAGAAGGGCCAGAAGAACUCCCGGGAGCGGAUGAAGCGGAUCGAGGAGGGCAUCAA |
| | | GGAGCUGGGCUCCCAGAUCCUGAAGGAGCACCCCGUGGAGAACACCCAGCUGCAGAACGAGAAGCUGUACCUGUACUACCUGCAGAACGGC |
| | | CGGGACAUGUACGUGGACCAGGAGCUGGACAUCAACCGGCUGUCCGACUACGACGUGGACCACAUCGUGCCCCAGUCCUUCCUGAAGGACG |
| | | ACUCCAUCGACAACAAGGUGCUGACCCGGUCCGACAAGAACCGGGGCAAGUCCGACAACGUGCCCUCCGAGGAGGUGGUGAAGAAGAUGAA |
| | | GAACUACUGGCGGCAGCUGCUGAACGCCAAGCUGAUCACCCAGCGGAAGUUCGACAACCUGACCAAGGCCGAGCGGGGCGGCCUGUCCGAG |
| | | CUGGACAAGGCCGGCUUCAUCAAGCGGCAGCUGGUGGAGACCCGGCAGAUCACCAAGCACGUGGCCCAGAUCCUGGACUCCCGGAUGAACA |
| | | CCAAGUACGACGAGAACGACAAGCUGAUCCGGGAGGUGAAGGUGAUCACCCUGAAGUCCAAGCUGGUGUCCGACUUCCGGAAGGACUUCCA |
| | | GUUCUACAAGGUGCGGGAGAUCAACAACUACCACCACGCCCACGACGCCUACCUGAACGCCGUGGUGGGCACCGCCCUGAUCAAGAAGUAC |
| | | CCCAAGCUGGAGUCCGAGUUCGUGUACGGCGACUACAAGGUGUACGACGUGCGGAAGAUGAUCGCCAAGUCCGAGCAGGAGAUCGGCAAGG |
| | | CCACCGCCAAGUACUUCUUCUACUCCAACAUCAUGAACUUCUUCAAGACCGAGAUCACCCUGGCCAACGGCGAGAUCCGGAAGCGGCCCCU |
| | | GAUCGAGACCAACGGCGAGACCGGCGAGAUCGUGUGGGACAAGGGCCGGGACUUCGCCACCGUGCGGAAGGUGCUGUCCAUGCCCCAGGUG |
| | | AACAUCGUGAAGAAGACCGAGGUGCAGACCGGCGGCUUCUCCAAGGAGUCCAUCCUGCCCAAGCGGAACUCCGACAAGCUGAUCGCCCGGA |
| | | AGAAGGACUGGGACCCCAAGAAGUACGGCGGCUUCGACUCCCCCACCGUGGCCUACUCCGUGCUGGUGGUGGCCAAGGUGGAGAAGGGCAA |
| | | GUCCAAGAAGCUGAAGUCCGUGAAGGAGCUGCUGGGCAUCACCAUCAUGGAGCGGUCCUCCUUCGAGAAGAACCCCAUCGACUUCCUGGAG |
| | | GCCAAGGGCUACAAGGAGGUGAAGAAGGACCUGAUCAUCAAGCUGCCCAAGUACUCCCUGUUCGAGCUGGAGAACGGCCGGAAGCGGAUGC |
| | | UGGCCUCCGCCGGCGAGCUGCAGAAGGGCAACGAGCUGGCCCUGCCCUCCAAGUACGUGAACUUCCUGUACCUGGCCUCCCACUACGAGAA |
| | | GCUGAAGGGCUCCCCCGAGGACAACGAGCAGAAGCAGCUGUUCGUGGAGCAGCACAAGCACUACCUGGACGAGAUCAUCGAGCAGAUCUCC |
| | | GAGUUCUCCAAGCGGGUGAUCCUGGCCGACGCCAACCUGGACAAGGUGCUGUCCGCCUACAACAAGCACCGGGACAAGCCCAUCCGGGAGC |
| | | AGGCCGAGAACAUCAUCCACCUGUUCACCCUGACCAACCUGGGCGCCCCCGCCGCCUUCAAGUACUUCGACACCACCAUCGACAAGAAGCG |
| | | GUACACCUCCACCAAGGAGGUGCUGGACGCCACCCUGAUCCACCAGUCCAUCACCGGCCUGUACGAGACCCGGAUCGACCUGUCCCAGCUG |
| | | GGCGGCGACGGCGCCCCCGAGUCCGCCACCGAGUCCGGCGGCACCUCCACCGAGUCCGAGGGCUCCGCCGGCACCUCCACCGAGUCCGAGG |
| | | GCUCCUCCUCCGGUGCCGCCUUCAAGCCCAACCCCAUCAACUACAUCCUGGGCCUGGACAUCGGCAUCGCCUCCGUGGGCUGGGCCAUGGU |
| | | GGAGAUCGACGAGGAGGAGAACCCCAUCCGGCUGAUCGACCUGGGCGUGCGGGUGUUCGAGCGGGCCGAGGUGCCCAAGACCGGCGACUCC |
| | | CUGGCCAUGGCCCGGCGGCUGGCCCGGUCCGUGCGGCGGCUGACCCGGCGGCGGGCCCACCGGCUGCUGCGGGCCCGGCGGCUGCUGAAGC |
| | | GGGAGGGCGUGCUGCAGGCCGCCGACUUCGACGAGAACGGCCUGAUCAAGUCCCUGCCCAACACCCCCUGGCAGCUGCGGGCCGCCGCCCU |
| | | GGACCGGAAGCUGACCCCCCUGGAGUGGUCCGCCGUGCUGCUGCACCUGAUCAAGCACCGGGGCUACCUGUCCCAGCGGAAGAACGAGGGC |
| | | GAGACCGCCGACAAGGAGCUGGGCGCCCUGCUGAAGGGCGUGGCCAACAACGCCCACGCCCUGCAGACCGGCGACUUCCGGACCCCCGCCG |
| | | AGCUGGCCCUGAACAAGUUCGAGAAGGAGUCCGGCCACAUCCGGAACCAGCGGGGCGACUACUCCCACACCUUCUCCCGGAAGGACCUGCA |
| | | GGCCGAGCUGAUCCUGCUGUUCGAGAAGCAGAAGGAGUUCGGCAACCCCCACGUGUCCGGCGGCCUGAAGGAGGGCAUCGAGACCCUGCUG |
| | | AUGACCCAGCGGCCCGCCCUGUCCGGCGACGCCGUGCAGAAGAUGCUGGGCCACUGCACCUUCGAGCCCGCCGAGCCCAAGGCCGCCAAGA |
| | | ACACCUACACCGCCGAGCGGUUCAUCUGGCUGACCAAGCUGAACAACCUGCGGAUCCUGGAGCAGGGCUCCGAGCGGCCCCUGACCGACAC |
| | | CGAGCGGGCCACCCUGAUGGACGAGCCCUACCGGAAGUCCAAGCUGACCUACGCCCAGGCCCGGAAGCUGCUGGGCCUGGAGGACACCGCC |
| | | UUCUUCAAGGGCCUGCGGUACGGCAAGGACAACGCCGAGGCCUCCACCCUGAUGGAGAUGAAGGCCUACCACGCCAUCUCCCGGGCCCUGG |
| | | AGAAGGAGGGCCUGAAGGACAAGAAGUCCCCCCUGAACCUGUCCUCCGAGCUGCAGGACGAGAUCGGCACCGCCUUCUCCCUGUUCAAGAC |
| | | CGACGAGGACAUCACCGGCCGGCUGAAGGACCGGGUGCAGCCCGAGAUCCUGGAGGCCCUGCUGAAGCACAUCUCCUUCGACAAGUUCGUG |
| | | CAGAUCUCCCUGAAGGCCCUGCGGCGGAUCGUGCCCCUGAUGGAGCAGGGCAAGCGGUACGACGAGGCCUGCGCCGAGAUCUACGGCGACC |
| | | ACUACGGCAAGAAGAACACCGAGGAGAAGAUCUACCUGCCCCCCAUCCCCGCCGACGAGAUCCGGAACCCCGUGGUGCUGCGGGCCCUGUC |
| | | CCAGGCCCGGAAGGUGAUCAACGGCGUGGUGCGGCGGUACGGCUCCCCCGCCCGGAUCCACAUCGAGACCGCCCGGGAGGUGGGCAAGUCC |
| | | UUCAAGGACCGGAAGGAGAUCGAGAAGCGGCAGGAGGAGAACCGGAAGGACCGGGAGAAGGCCGCCGCCAAGUUCCGGGAGUACUUCCCCA |
| | | ACUUCGUGGGCGAGCCCAAGUCCAAGGACAUCCUGAAGCUGCGGCUGUACGAGCAGCAGCACGGCAAGUGCCUGUACUCCGGCAAGGAGAU |
| | | CAACCUGGUGCGGCUGAACGAGAAGGGCUACGUGGAGAUCGACCACGCCCUGCCCUUCUCCCGGACCUGGGACGACUCCUUCAACAACAAG |
| | | GUGCUGGUGCUGGGCUCCGAGAACCAGAACAAGGGCAACCAGACCCCCUACGAGUACUUCAACGGCAAGGACAACUCCCGGGAGUGGCAGG |
| | | AGUUCAAGGCCCGGGUGGAGACCUCCCGGUUCCCCCGGUCCAAGAAGCAGCGGAUCCUGCUGCAGAAGUUCGACGAGGACGGCUUCAAGGA |
| | | GUGCAACCUGAACGACACCCGGUACGUGAACCGCUUCCUGUGCCAGUUCGUGGCCGACCACAUCCUGCUGACCGGCAAGGGCAAGCGGCGG |
| | | GUGUUCGCCUCCAACGGCCAGAUCACCAACCUGCUGCGGGGCUUCUGGGGCCUGCGGAAGGUGCGGGCCGAGAACGACCGGCACCACGCCC |
| | | UGGACGCCGUGGUGGUGGCCUGCUCCACCGUGGCCAUGCAGCAGAAGAUCACCCGGUUCGUGCGGUACAAGGAGAUGAACGCCUUCGACGG |
| | | CAAGACCAUCGACAAGGAGACCGGCAAGGUGCUGCACCAGAAGACCCACUUCCCCCAGCCCUGGGAGUUCUUCGCCCAGGAGGUGAUGAUC |
| | | CGGGUGUUCGGCAAGCCCGACGGCAAGCCCGAGUUCGAGGAGGCCGACACCCCCGAGAAGCUGCGGACCCUGCUGGCCGAGAAGCUGUCCU |
| | | CCCGGCCCGAGGCCGUGCACGAGUACGUGACCCCCCUGUUCGUGUCCCGGGCCCCCAACCGGAAGAUGUCCGGCGCCCACAAGGACACCCU |
| | | GCGGUCCGCCAAGCGGUUCGUGAAGCACAACGAGAAGAUCUCCGUGAAGCGGGUGUGGCUGACCGAGAUCAAGCUGGCCGACCUGGAGAAC |
| | | AUGGUGAACUACAAGAACGGCCGGGAGAUCGAGCUGUACGAGGCCCUGAAGGCCCGGCUGGAGGCCUACGGCGGCAACGCCAAGCAGGCCU |
| | | UCGACCCCAAGGACAACCCCUUCUACAAGAAGGGCGGCCAGCUGGUGAAGGCCGUGCGGGUGGAGAAGACCCAGGAGUCCGGCGUGCUGCU |
| | | GAACAAGAAGAACGCCUACACCAUCGCCGACAACGGCGACAUGGUGCGGGUGGACGUGUUCUGCAAGGUGGACAAGAAGGGCAAGAACCAG |
| | | UACUUCAUCGUGCCCAUCUACGCCUGGCAGGUGGCCGAGAACAUCCUGCCCGACAUCGACUGCAAGGGCUACCGGAUCGACGACUCCUACA |
| | | CCUUCUGCUUCUCCCUGCACAAGUACGACCUGAUCGCCUUCCAGAAGGACGAGAAGUCCAAGGUGGAGUUCGCCUACUACAUCAACUGCGA |
| | | CUCCUCCAACGGCCGGUUCUACCUGGCCUGGCACGACAAGGGCUCCAAGGAGCAGCAGUUCCGGAUCUCCACCCAGAACCUGGUGCUGAUC |
| | | CAGAAGUACCAGGUGAACGAGCUGGGCAAGGAGAUCCGGCCCUGCCGGCUGAAGAAGCGGCCCCCCGUGCGGUCCGGAAAGCGGACCGCCG |
| | | ACGGCUCCGGAGGAGGAAGCCCGAAGAAGAAGAGAAAGGUCAGCGAAAGCGCAACACCGGAAAGCGUCAGCGGAUGGAGACUGUUCAAGAA |
| | | GAUCAGCUAG |
| 70 | Cas9- | MDKKYSIGLDIGTNSVGWAVITDEYKVPSKKFKVLGNTDRHSIKKNLIGALLFDSGETAEATRLKRTARRRYTRRKNRICYLQEIFSNEMA |
| | Cas9 | KVDDSFFHRLEESFLVEEDKKHERHPIFGNIVDEVAYHEKYPTIYHLRKKLVDSTDKADLRLIYLALAHMIKFRGHFLIEGDLNPDNSDVD |
| | fusion- | KLFIQLVQTYNQLFEENPINASGVDAKAILSARLSKSRRLENLIAQLPGEKKNGLFGNLIALSLGLTPNFKSNFDLAEDAKLQLSKDTYDD |
| | 31 | DLDNLLAQIGDQYADLFLAAKNLSDAILLSDILRVNTEITKAPLSASMIKRYDEHHQDLTLLKALVRQQLPEKYKEIFFDQSKNGYAGYID |
| | amino | GGASQEEFYKFIKPILEKMDGTEELLVKLNREDLLRKQRTFDNGSIPHQIHLGELHAILRRQEDFYPFLKDNREKIEKILTFRIPYYVGPL |
| | acid | ARGNSRFAWMTRKSEETITPWNFEEVVDKGASAQSFIERMTNFDKNLPNEKVLPKHSLLYEYFTVYNELTKVKYVTEGMRKPAFLSGEQKK |
| | residue | AIVDLLFKTNRKVTVKQLKEDYFKKIECFDSVEISGVEDRFNASLGTYHDLLKIIKDKDFLDNEENEDILEDIVLTLTLFEDREMIEERLK |
| | linker | TYAHLFDDKVMKQLKRRRYTGWGRLSRKLINGIRDKQSGKTILDFLKSDGFANRNFMQLIHDDSLTFKEDIQKAQVSGQGDSLHEHIANLA |
| | and | GSPAIKKGILQTVKVVDELVKVMGRHKPENIVIEMARENQTTQKGQKNSRERMKRIEEGIKELGSQILKEHPVENTQLQNEKLYLYYLQNG |
| | HiBit | RDMYVDQELDINRLSDYDVDHIVPQSFLKDDSIDNKVLTRSDKNRGKSDNVPSEEVVKKMKNYWRQLLNAKLITQRKFDNLTKAERGGLSE |
| | tag | LDKAGFIKRQLVETRQITKHVAQILDSRMNTKYDENDKLIREVKVITLKSKLVSDFRKDFQFYKVREINNYHHAHDAYLNAVVGTALIKKY |
| | (mRNA | PKLESEFVYGDYKVYDVRKMIAKSEQEIGKATAKYFFYSNIMNFFKTEITLANGEIRKRPLIETNGETGEIVWDKGRDFATVRKVLSMPQV |
| | S)- | NIVKKTEVQTGGFSKESILPKRNSDKLIARKKDWDPKKYGGFDSPTVAYSVLVVAKVEKGKSKKLKSVKELLGITIMERSSFEKNPIDFLE |
| | amino | AKGYKEVKKDLIIKLPKYSLFELENGRKRMLASAGELQKGNELALPSKYVNFLYLASHYEKLKGSPEDNEQKQLFVEQHKHYLDEIIEQIS |
| | acid | EFSKRVILADANLDKVLSAYNKHRDKPIREQAENIIHLFTLTNLGAPAAFKYFDTTIDKKRYTSTKEVLDATLIHQSITGLYETRIDLSQL |
| | sequence | GGDGAPESATESGGTSTESEGSAGTSTESEGSSSGAAFKPNPINYILGLDIGIASVGWAMVEIDEEENPIRLIDLGVRVFERAEVPKTGDS |
| | | LAMARRLARSVRRLTRRRAHRLLRARRLLKREGVLQAADFDENGLIKSLPNTPWQLRAAALDRKLTPLEWSAVLLHLIKHRGYLSQRKNEG |
| | | ETADKELGALLKGVANNAHALQTGDFRTPAELALNKFEKESGHIRNQRGDYSHTFSRKDLQAELILLFEKQKEFGNPHVSGGLKEGIETLL |
| | | MTQRPALSGDAVQKMLGHCTFEPAEPKAAKNTYTAERFIWLTKLNNLRILEQGSERPLTDTERATLMDEPYRKSKLTYAQARKLLGLEDTA |
| | | FFKGLRYGKDNAEASTLMEMKAYHAISRALEKEGLKDKKSPLNLSSELQDEIGTAFSLFKTDEDITGRLKDRVQPEILEALLKHISFDKFV |
| | | QISLKALRRIVPLMEQGKRYDEACAEIYGDHYGKKNTEEKIYLPPIPADEIRNPVVLRALSQARKVINGVVRRYGSPARIHIETAREVGKS |
| | | FKDRKEIEKRQEENRKDREKAAAKFREYFPNFVGEPKSKDILKLRLYEQQHGKCLYSGKEINLVRLNEKGYVEIDHALPFSRTWDDSFNNK |
| | | VLVLGSENQNKGNQTPYEYFNGKDNSREWQEFKARVETSRFPRSKKQRILLQKFDEDGFKECNLNDTRYVNRFLCQFVADHILLTGKGKRR |
| | | VFASNGQITNLLRGFWGLRKVRAENDRHHALDAVVVACSTVAMQQKITRFVRYKEMNAFDGKTIDKETGKVLHQKTHFPQPWEFFAQEVMI |
| | | RVFGKPDGKPEFEEADTPEKLRTLLAEKLSSRPEAVHEYVTPLFVSRAPNRKMSGAHKDTLRSAKRFVKHNEKISVKRVWLTEIKLADLEN |
| | | MVNYKNGREIELYEALKARLEAYGGNAKQAFDPKDNPFYKKGGQLVKAVRVEKTQESGVLLNKKNAYTIADNGDMVRVDVFCKVDKKGKNQ |
| | | YFIVPIYAWQVAENILPDIDCKGYRIDDSYTFCFSLHKYDLIAFQKDEKSKVEFAYYINCDSSNGRFYLAWHDKGSKEQQFRISTQNLVLI |
| | | QKYQVNELGKEIRPCRLKKRPPVRSGKRTADGSGGGSPKKKRKVSESATPESVSGWRLFKKIS* |
| 71 | Cas9- | AUGGACAAGAAGUACUCCAUCGGCCUGGACAUCGGCACCAACUCCGUGGGCUGGGCCGUGAUCACCGACGAGUACAAGGUGCCCUCCAAGA |
| | Cas9 | AGUUCAAGGUGCUGGGCAACACCGACCGGCACUCCAUCAAGAAGAACCUGAUCGGCGCCCUGCUGUUCGACUCCGGCGAGACCGCCGAGGC |
| | fusion- | CACCCGGCUGAAGCGGACCGCCCGGCGGCGGUACACCCGGCGGAAGAACCGGAUCUGCUACCUGCAGGAGAUCUUCUCCAACGAGAUGGCC |
| | 31 | AAGGUGGACGACUCCUUCUUCCACCGGCUGGAGGAGUCCUUCCUGGUGGAGGAGGACAAGAAGCACGAGCGGCACCCCAUCUUCGGCAACA |
| | amino | UCGUGGACGAGGUGGCCUACCACGAGAAGUACCCCACCAUCUACCACCUGCGGAAGAAGCUGGUGGACUCCACCGACAAGGCCGACCUGCG |
| | acid | GCUGAUCUACCUGGCCCUGGCCCACAUGAUCAAGUUCCGGGGCCACUUCCUGAUCGAGGGCGACCUGAACCCCGACAACUCCGACGUGGAC |
| | residual | AAGCUGUUCAUCCAGCUGGUGCAGACCUACAACCAGCUGUUCGAGGAGAACCCCAUCAACGCCUCCGGCGUGGACGCCAAGGCCAUCCUGU |
| | linker | CCGCCCGGCUGUCCAAGUCCCGGCGGCUGGAGAACCUGAUCGCCCAGCUGCCCGGCGAGAAGAAGAACGGCCUGUUCGGCAACCUGAUCGC |
| | (mRNA | CCUGUCCCUGGGCCUGACCCCCAACUUCAAGUCCAACUUCGACCUGGCCGAGGACGCCAAGCUGCAGCUGUCCAAGGACACCUACGACGAC |
| | S)- | GACCUGGACAACCUGCUGGCCCAGAUCGGCGACCAGUACGCCGACCUGUUCCUGGCCGCCAAGAACCUGUCCGACGCCAUCCUGCUGUCCG |
| | mRNA | ACAUCCUGCGGGUGAACACCGAGAUCACCAAGGCCCCCCUGUCCGCCUCCAUGAUCAAGCGGUACGACGAGCACCACCAGGACCUGACCCU |
| | sequence | GCUGAAGGCCCUGGUGCGGCAGCAGCUGCCCGAGAAGUACAAGGAGAUCUUCUUCGACCAGUCCAAGAACGGCUACGCCGGCUACAUCGAC |
| | | GGCGGCGCCUCCCAGGAGGAGUUCUACAAGUUCAUCAAGCCCAUCCUGGAGAAGAUGGACGGCACCGAGGAGCUGCUGGUGAAGCUGAACC |
| | | GGGAGGACCUGCUGCGGAAGCAGCGGACCUUCGACAACGGCUCCAUCCCCCACCAGAUCCACCUGGGCGAGCUGCACGCCAUCCUGCGGCG |
| | | GCAGGAGGACUUCUACCCCUUCCUGAAGGACAACCGGGAGAAGAUCGAGAAGAUCCUGACCUUCCGGAUCCCCUACUACGUGGGCCCCCUG |
| | | GCCCGGGGCAACUCCCGGUUCGCCUGGAUGACCCGGAAGUCCGAGGAGACCAUCACCCCCUGGAACUUCGAGGAGGUGGUGGACAAGGGCG |
| | | CCUCCGCCCAGUCCUUCAUCGAGCGGAUGACCAACUUCGACAAGAACCUGCCCAACGAGAAGGUGCUGCCCAAGCACUCCCUGCUGUACGA |
| | | GUACUUCACCGUGUACAACGAGCUGACCAAGGUGAAGUACGUGACCGAGGGCAUGCGGAAGCCCGCCUUCCUGUCCGGCGAGCAGAAGAAG |
| | | GCCAUCGUGGACCUGCUGUUCAAGACCAACCGGAAGGUGACCGUGAAGCAGCUGAAGGAGGACUACUUCAAGAAGAUCGAGUGCUUCGACU |
| | | CCGUGGAGAUCUCCGGCGUGGAGGACCGGUUCAACGCCUCCCUGGGCACCUACCACGACCUGCUGAAGAUCAUCAAGGACAAGGACUUCCU |
| | | GGACAACGAGGAGAACGAGGACAUCCUGGAGGACAUCGUGCUGACCCUGACCCUGUUCGAGGACCGGGAGAUGAUCGAGGAGCGGCUGAAG |
| | | ACCUACGCCCACCUGUUCGACGACAAGGUGAUGAAGCAGCUGAAGCGGCGGCGGUACACCGGCUGGGGCCGGCUGUCCCGGAAGCUGAUCA |
| | | ACGGCAUCCGGGACAAGCAGUCCGGCAAGACCAUCCUGGACUUCCUGAAGUCCGACGGCUUCGCCAACCGGAACUUCAUGCAGCUGAUCCA |
| | | CGACGACUCCCUGACCUUCAAGGAGGACAUCCAGAAGGCCCAGGUGUCCGGCCAGGGCGACUCCCUGCACGAGCACAUCGCCAACCUGGCC |
| | | GGCUCCCCCGCCAUCAAGAAGGGCAUCCUGCAGACCGUGAAGGUGGUGGACGAGCUGGUGAAGGUGAUGGGCCGGCACAAGCCCGAGAACA |
| | | UCGUGAUCGAGAUGGCCCGGGAGAACCAGACCACCCAGAAGGGCCAGAAGAACUCCCGGGAGCGGAUGAAGCGGAUCGAGGAGGGCAUCAA |
| | | GGAGCUGGGCUCCCAGAUCCUGAAGGAGCACCCCGUGGAGAACACCCAGCUGCAGAACGAGAAGCUGUACCUGUACUACCUGCAGAACGGC |
| | | CGGGACAUGUACGUGGACCAGGAGCUGGACAUCAACCGGCUGUCCGACUACGACGUGGACCACAUCGUGCCCCAGUCCUUCCUGAAGGACG |
| | | ACUCCAUCGACAACAAGGUGCUGACCCGGUCCGACAAGAACCGGGGCAAGUCCGACAACGUGCCCUCCGAGGAGGUGGUGAAGAAGAUGAA |
| | | GAACUACUGGCGGCAGCUGCUGAACGCCAAGCUGAUCACCCAGCGGAAGUUCGACAACCUGACCAAGGCCGAGCGGGGCGGCCUGUCCGAG |
| | | CUGGACAAGGCCGGCUUCAUCAAGCGGCAGCUGGUGGAGACCCGGCAGAUCACCAAGCACGUGGCCCAGAUCCUGGACUCCCGGAUGAACA |
| | | CCAAGUACGACGAGAACGACAAGCUGAUCCGGGAGGUGAAGGUGAUCACCCUGAAGUCCAAGCUGGUGUCCGACUUCCGGAAGGACUUCCA |
| | | GUUCUACAAGGUGCGGGAGAUCAACAACUACCACCACGCCCACGACGCCUACCUGAACGCCGUGGUGGGCACCGCCCUGAUCAAGAAGUAC |
| | | CCCAAGCUGGAGUCCGAGUUCGUGUACGGCGACUACAAGGUGUACGACGUGCGGAAGAUGAUCGCCAAGUCCGAGCAGGAGAUCGGCAAGG |
| | | CCACCGCCAAGUACUUCUUCUACUCCAACAUCAUGAACUUCUUCAAGACCGAGAUCACCCUGGCCAACGGCGAGAUCCGGAAGCGGCCCCU |
| | | GAUCGAGACCAACGGCGAGACCGGCGAGAUCGUGUGGGACAAGGGCCGGGACUUCGCCACCGUGCGGAAGGUGCUGUCCAUGCCCCAGGUG |
| | | AACAUCGUGAAGAAGACCGAGGUGCAGACCGGCGGCUUCUCCAAGGAGUCCAUCCUGCCCAAGCGGAACUCCGACAAGCUGAUCGCCCGGA |
| | | AGAAGGACUGGGACCCCAAGAAGUACGGCGGCUUCGACUCCCCCACCGUGGCCUACUCCGUGCUGGUGGUGGCCAAGGUGGAGAAGGGCAA |
| | | GUCCAAGAAGCUGAAGUCCGUGAAGGAGCUGCUGGGCAUCACCAUCAUGGAGCGGUCCUCCUUCGAGAAGAACCCCAUCGACUUCCUGGAG |
| | | GCCAAGGGCUACAAGGAGGUGAAGAAGGACCUGAUCAUCAAGCUGCCCAAGUACUCCCUGUUCGAGCUGGAGAACGGCCGGAAGCGGAUGC |
| | | UGGCCUCCGCCGGCGAGCUGCAGAAGGGCAACGAGCUGGCCCUGCCCUCCAAGUACGUGAACUUCCUGUACCUGGCCUCCCACUACGAGAA |
| | | GCUGAAGGGCUCCCCCGAGGACAACGAGCAGAAGCAGCUGUUCGUGGAGCAGCACAAGCACUACCUGGACGAGAUCAUCGAGCAGAUCUCC |
| | | GAGUUCUCCAAGCGGGUGAUCCUGGCCGACGCCAACCUGGACAAGGUGCUGUCCGCCUACAACAAGCACCGGGACAAGCCCAUCCGGGAGC |
| | | AGGCCGAGAACAUCAUCCACCUGUUCACCCUGACCAACCUGGGCGCCCCCGCCGCCUUCAAGUACUUCGACACCACCAUCGACAAGAAGCG |
| | | GUACACCUCCACCAAGGAGGUGCUGGACGCCACCCUGAUCCACCAGUCCAUCACCGGCCUGUACGAGACCCGGAUCGACCUGUCCCAGCUG |
| | | GGCGGCGACGGCGCCCCCGAGUCCGCCACCGAGUCCGGCGGCACCUCCACCGAGUCCGAGGGCUCCGCCGGCACCUCCACCGAGUCCGAGG |
| | | GCUCCUCCUCCGGUGCCGCCUUCAAGCCCAACCCCAUCAACUACAUCCUGGGCCUGGACAUCGGCAUCGCCUCCGUGGGCUGGGCCAUGGU |
| | | GGAGAUCGACGAGGAGGAGAACCCCAUCCGGCUGAUCGACCUGGGCGUGCGGGUGUUCGAGCGGGCCGAGGUGCCCAAGACCGGCGACUCC |
| | | CUGGCCAUGGCCCGGCGGCUGGCCCGGUCCGUGCGGCGGCUGACCCGGCGGCGGGCCCACCGGCUGCUGCGGGCCCGGCGGCUGCUGAAGC |
| | | GGGAGGGCGUGCUGCAGGCCGCCGACUUCGACGAGAACGGCCUGAUCAAGUCCCUGCCCAACACCCCCUGGCAGCUGCGGGCCGCCGCCCU |
| | | GGACCGGAAGCUGACCCCCCUGGAGUGGUCCGCCGUGCUGCUGCACCUGAUCAAGCACCGGGGCUACCUGUCCCAGCGGAAGAACGAGGGC |
| | | GAGACCGCCGACAAGGAGCUGGGCGCCCUGCUGAAGGGCGUGGCCAACAACGCCCACGCCCUGCAGACCGGCGACUUCCGGACCCCCGCCG |
| | | AGCUGGCCCUGAACAAGUUCGAGAAGGAGUCCGGCCACAUCCGGAACCAGCGGGGCGACUACUCCCACACCUUCUCCCGGAAGGACCUGCA |
| | | GGCCGAGCUGAUCCUGCUGUUCGAGAAGCAGAAGGAGUUCGGCAACCCCCACGUGUCCGGCGGCCUGAAGGAGGGCAUCGAGACCCUGCUG |
| | | AUGACCCAGCGGCCCGCCCUGUCCGGCGACGCCGUGCAGAAGAUGCUGGGCCACUGCACCUUCGAGCCCGCCGAGCCCAAGGCCGCCAAGA |
| | | ACACCUACACCGCCGAGCGGUUCAUCUGGCUGACCAAGCUGAACAACCUGCGGAUCCUGGAGCAGGGCUCCGAGCGGCCCCUGACCGACAC |
| | | CGAGCGGGCCACCCUGAUGGACGAGCCCUACCGGAAGUCCAAGCUGACCUACGCCCAGGCCCGGAAGCUGCUGGGCCUGGAGGACACCGCC |
| | | UUCUUCAAGGGCCUGCGGUACGGCAAGGACAACGCCGAGGCCUCCACCCUGAUGGAGAUGAAGGCCUACCACGCCAUCUCCCGGGCCCUGG |
| | | AGAAGGAGGGCCUGAAGGACAAGAAGUCCCCCCUGAACCUGUCCUCCGAGCUGCAGGACGAGAUCGGCACCGCCUUCUCCCUGUUCAAGAC |
| | | CGACGAGGACAUCACCGGCCGGCUGAAGGACCGGGUGCAGCCCGAGAUCCUGGAGGCCCUGCUGAAGCACAUCUCCUUCGACAAGUUCGUG |
| | | CAGAUCUCCCUGAAGGCCCUGCGGCGGAUCGUGCCCCUGAUGGAGCAGGGCAAGCGGUACGACGAGGCCUGCGCCGAGAUCUACGGCGACC |
| | | ACUACGGCAAGAAGAACACCGAGGAGAAGAUCUACCUGCCCCCCAUCCCCGCCGACGAGAUCCGGAACCCCGUGGUGCUGCGGGCCCUGUC |
| | | CCAGGCCCGGAAGGUGAUCAACGGCGUGGUGCGGCGGUACGGCUCCCCCGCCCGGAUCCACAUCGAGACCGCCCGGGAGGUGGGCAAGUCC |
| | | UUCAAGGACCGGAAGGAGAUCGAGAAGCGGCAGGAGGAGAACCGGAAGGACCGGGAGAAGGCCGCCGCCAAGUUCCGGGAGUACUUCCCCA |
| | | ACUUCGUGGGCGAGCCCAAGUCCAAGGACAUCCUGAAGCUGCGGCUGUACGAGCAGCAGCACGGCAAGUGCCUGUACUCCGGCAAGGAGAU |
| | | CAACCUGGUGCGGCUGAACGAGAAGGGCUACGUGGAGAUCGACCACGCCCUGCCCUUCUCCCGGACCUGGGACGACUCCUUCAACAACAAG |
| | | GUGCUGGUGCUGGGCUCCGAGAACCAGAACAAGGGCAACCAGACCCCCUACGAGUACUUCAACGGCAAGGACAACUCCCGGGAGUGGCAGG |
| | | AGUUCAAGGCCCGGGUGGAGACCUCCCGGUUCCCCCGGUCCAAGAAGCAGCGGAUCCUGCUGCAGAAGUUCGACGAGGACGGCUUCAAGGA |
| | | GUGCAACCUGAACGACACCCGGUACGUGAACCGCUUCCUGUGCCAGUUCGUGGCCGACCACAUCCUGCUGACCGGCAAGGGCAAGCGGCGG |
| | | GUGUUCGCCUCCAACGGCCAGAUCACCAACCUGCUGCGGGGCUUCUGGGGCCUGCGGAAGGUGCGGGCCGAGAACGACCGGCACCACGCCC |
| | | UGGACGCCGUGGUGGUGGCCUGCUCCACCGUGGCCAUGCAGCAGAAGAUCACCCGGUUCGUGCGGUACAAGGAGAUGAACGCCUUCGACGG |
| | | CAAGACCAUCGACAAGGAGACCGGCAAGGUGCUGCACCAGAAGACCCACUUCCCCCAGCCCUGGGAGUUCUUCGCCCAGGAGGUGAUGAUC |
| | | CGGGUGUUCGGCAAGCCCGACGGCAAGCCCGAGUUCGAGGAGGCCGACACCCCCGAGAAGCUGCGGACCCUGCUGGCCGAGAAGCUGUCCU |
| | | CCCGGCCCGAGGCCGUGCACGAGUACGUGACCCCCCUGUUCGUGUCCCGGGCCCCCAACCGGAAGAUGUCCGGCGCCCACAAGGACACCCU |
| | | GCGGUCCGCCAAGCGGUUCGUGAAGCACAACGAGAAGAUCUCCGUGAAGCGGGUGUGGCUGACCGAGAUCAAGCUGGCCGACCUGGAGAAC |
| | | AUGGUGAACUACAAGAACGGCCGGGAGAUCGAGCUGUACGAGGCCCUGAAGGCCCGGCUGGAGGCCUACGGCGGCAACGCCAAGCAGGCCU |
| | | UCGACCCCAAGGACAACCCCUUCUACAAGAAGGGCGGCCAGCUGGUGAAGGCCGUGCGGGUGGAGAAGACCCAGGAGUCCGGCGUGCUGCU |
| | | GAACAAGAAGAACGCCUACACCAUCGCCGACAACGGCGACAUGGUGCGGGUGGACGUGUUCUGCAAGGUGGACAAGAAGGGCAAGAACCAG |
| | | UACUUCAUCGUGCCCAUCUACGCCUGGCAGGUGGCCGAGAACAUCCUGCCCGACAUCGACUGCAAGGGCUACCGGAUCGACGACUCCUACA |
| | | CCUUCUGCUUCUCCCUGCACAAGUACGACCUGAUCGCCUUCCAGAAGGACGAGAAGUCCAAGGUGGAGUUCGCCUACUACAUCAACUGCGA |
| | | CUCCUCCAACGGCCGGUUCUACCUGGCCUGGCACGACAAGGGCUCCAAGGAGCAGCAGUUCCGGAUCUCCACCCAGAACCUGGUGCUGAUC |
| | | CAGAAGUACCAGGUGAACGAGCUGGGCAAGGAGAUCCGGCCCUGCCGGCUGAAGAAGCGGCCCCCCGUGCGGUCCGGAAAGCGGACCGCCG |
| | | ACGGCUCCGGAGGAGGAAGCCCGAAGAAGAAGAGAAAGGUCUAG |
| 72 | Cas9- | MDKKYSIGLDIGTNSVGWAVITDEYKVPSKKFKVLGNTDRHSIKKNLIGALLFDSGETAEATRLKRTARRRYTRRKNRICYLQEIFSNEMA |
| | Cas9 | KVDDSFFHRLEESFLVEEDKKHERHPIFGNIVDEVAYHEKYPTIYHLRKKLVDSTDKADLRLIYLALAHMIKFRGHFLIEGDLNPDNSDVD |
| | fusion- | KLFIQLVQTYNQLFEENPINASGVDAKAILSARLSKSRRLENLIAQLPGEKKNGLFGNLIALSLGLTPNFKSNFDLAEDAKLQLSKDTYDD |
| | 31 | DLDNLLAQIGDQYADLFLAAKNLSDAILLSDILRVNTEITKAPLSASMIKRYDEHHQDLTLLKALVRQQLPEKYKEIFFDQSKNGYAGYID |
| | amino | GGASQEEFYKFIKPILEKMDGTEELLVKLNREDLLRKQRTFDNGSIPHQIHLGELHAILRRQEDFYPFLKDNREKIEKILTFRIPYYVGPL |
| | acid | ARGNSRFAWMTRKSEETITPWNFEEVVDKGASAQSFIERMTNFDKNLPNEKVLPKHSLLYEYFTVYNELTKVKYVTEGMRKPAFLSGEQKK |
| | residual | AIVDLLFKTNRKVTVKQLKEDYFKKIECFDSVEISGVEDRFNASLGTYHDLLKIIKDKDFLDNEENEDILEDIVLTLTLFEDREMIEERLK |
| | linker | TYAHLFDDKVMKQLKRRRYTGWGRLSRKLINGIRDKQSGKTILDFLKSDGFANRNFMQLIHDDSLTFKEDIQKAQVSGQGDSLHEHIANLA |
| | (mRNA | GSPAIKKGILQTVKVVDELVKVMGRHKPENIVIEMARENQTTQKGQKNSRERMKRIEEGIKELGSQILKEHPVENTQLQNEKLYLYYLQNG |
| | S)- | RDMYVDQELDINRLSDYDVDHIVPQSFLKDDSIDNKVLTRSDKNRGKSDNVPSEEVVKKMKNYWRQLLNAKLITQRKFDNLTKAERGGLSE |
| | mRNA | LDKAGFIKRQLVETRQITKHVAQILDSRMNTKYDENDKLIREVKVITLKSKLVSDFRKDFQFYKVREINNYHHAHDAYLNAVVGTALIKKY |
| | sequence | PKLESEFVYGDYKVYDVRKMIAKSEQEIGKATAKYFFYSNIMNFFKTEITLANGEIRKRPLIETNGETGEIVWDKGRDFATVRKVLSMPQV |
| | | NIVKKTEVQTGGFSKESILPKRNSDKLIARKKDWDPKKYGGFDSPTVAYSVLVVAKVEKGKSKKLKSVKELLGITIMERSSFEKNPIDFLE |
| | | AKGYKEVKKDLIIKLPKYSLFELENGRKRMLASAGELQKGNELALPSKYVNFLYLASHYEKLKGSPEDNEQKQLFVEQHKHYLDEIIEQIS |
| | | EFSKRVILADANLDKVLSAYNKHRDKPIREQAENIIHLFTLTNLGAPAAFKYFDTTIDKKRYTSTKEVLDATLIHQSITGLYETRIDLSQL |
| | | GGDGAPESATESGGTSTESEGSAGTSTESEGSSSGAAFKPNPINYILGLDIGIASVGWAMVEIDEEENPIRLIDLGVRVFERAEVPKTGDS |
| | | LAMARRLARSVRRLTRRRAHRLLRARRLLKREGVLQAADFDENGLIKSLPNTPWQLRAAALDRKLTPLEWSAVLLHLIKHRGYLSQRKNEG |
| | | ETADKELGALLKGVANNAHALQTGDFRTPAELALNKFEKESGHIRNQRGDYSHTFSRKDLQAELILLFEKQKEFGNPHVSGGLKEGIETLL |
| | | MTQRPALSGDAVQKMLGHCTFEPAEPKAAKNTYTAERFIWLTKLNNLRILEQGSERPLTDTERATLMDEPYRKSKLTYAQARKLLGLEDTA |
| | | FFKGLRYGKDNAEASTLMEMKAYHAISRALEKEGLKDKKSPLNLSSELQDEIGTAFSLFKTDEDITGRLKDRVQPEILEALLKHISFDKFV |
| | | QISLKALRRIVPLMEQGKRYDEACAEIYGDHYGKKNTEEKIYLPPIPADEIRNPVVLRALSQARKVINGVVRRYGSPARIHIETAREVGKS |
| | | FKDRKEIEKRQEENRKDREKAAAKFREYFPNFVGEPKSKDILKLRLYEQQHGKCLYSGKEINLVRLNEKGYVEIDHALPFSRTWDDSFNNK |
| | | VLVLGSENQNKGNQTPYEYFNGKDNSREWQEFKARVETSRFPRSKKQRILLQKFDEDGFKECNLNDTRYVNRFLCQFVADHILLTGKGKRR |
| | | VFASNGQITNLLRGFWGLRKVRAENDRHHALDAVVVACSTVAMQQKITRFVRYKEMNAFDGKTIDKETGKVLHQKTHFPQPWEFFAQEVMI |
| | | RVFGKPDGKPEFEEADTPEKLRTLLAEKLSSRPEAVHEYVTPLFVSRAPNRKMSGAHKDTLRSAKRFVKHNEKISVKRVWLTEIKLADLEN |
| | | MVNYKNGREIELYEALKARLEAYGGNAKQAFDPKDNPFYKKGGQLVKAVRVEKTQESGVLLNKKNAYTIADNGDMVRVDVFCKVDKKGKNQ |
| | | YFIVPIYAWQVAENILPDIDCKGYRIDDSYTFCFSLHKYDLIAFQKDEKSKVEFAYYINCDSSNGRFYLAWHDKGSKEQQFRISTQNLVLI |
| | | QKYQVNELGKEIRPCRLKKRPPVRSGKRTADGSGGGSPKKKRKV* |
| 73 | Cas9- | GGGAAGCUCAGAAUAAACGCUCAACUUUGGCCGGAUCUGCCACCAUGGACAAGAAGUACUCCAUCGGCCUGGACAUCGGCACCAACUCCGU |
| | Cas9 | GGGCUGGGCCGUGAUCACCGACGAGUACAAGGUGCCCUCCAAGAAGUUCAAGGUGCUGGGCAACACCGACCGGCACUCCAUCAAGAAGAAC |
| | fusion- | CUGAUCGGCGCCCUGCUGUUCGACUCCGGCGAGACCGCCGAGGCCACCCGGCUGAAGCGGACCGCCCGGCGGCGGUACACCCGGCGGAAGA |
| | 21 | ACCGGAUCUGCUACCUGCAGGAGAUCUUCUCCAACGAGAUGGCCAAGGUGGACGACUCCUUCUUCCACCGGCUGGAGGAGUCCUUCCUGGU |
| | amino | GGAGGAGGACAAGAAGCACGAGCGGCACCCCAUCUUCGGCAACAUCGUGGACGAGGUGGCCUACCACGAGAAGUACCCCACCAUCUACCAC |
| | acid | CUGCGGAAGAAGCUGGUGGACUCCACCGACAAGGCCGACCUGCGGCUGAUCUACCUGGCCCUGGCCCACAUGAUCAAGUUCCGGGGCCACU |
| | residue | UCCUGAUCGAGGGCGACCUGAACCCCGACAACUCCGACGUGGACAAGCUGUUCAUCCAGCUGGUGCAGACCUACAACCAGCUGUUCGAGGA |
| | linker | GAACCCCAUCAACGCCUCCGGCGUGGACGCCAAGGCCAUCCUGUCCGCCCGGCUGUCCAAGUCCCGGCGGCUGGAGAACCUGAUCGCCCAG |
| | and | CUGCCCGGCGAGAAGAAGAACGGCCUGUUCGGCAACCUGAUCGCCCUGUCCCUGGGCCUGACCCCCAACUUCAAGUCCAACUUCGACCUGG |
| | HiBit | CCGAGGACGCCAAGCUGCAGCUGUCCAAGGACACCUACGACGACGACCUGGACAACCUGCUGGCCCAGAUCGGCGACCAGUACGCCGACCU |
| | tag | GUUCCUGGCCGCCAAGAACCUGUCCGACGCCAUCCUGCUGUCCGACAUCCUGCGGGUGAACACCGAGAUCACCAAGGCCCCCCUGUCCGCC |
| | (mRNA | UCCAUGAUCAAGCGGUACGACGAGCACCACCAGGACCUGACCCUGCUGAAGGCCCUGGUGCGGCAGCAGCUGCCCGAGAAGUACAAGGAGA |
| | T)- | UCUUCUUCGACCAGUCCAAGAACGGCUACGCCGGCUACAUCGACGGCGGCGCCUCCCAGGAGGAGUUCUACAAGUUCAUCAAGCCCAUCCU |
| | mRNA | GGAGAAGAUGGACGGCACCGAGGAGCUGCUGGUGAAGCUGAACCGGGAGGACCUGCUGCGGAAGCAGCGGACCUUCGACAACGGCUCCAUC |
| | sequence | CCCCACCAGAUCCACCUGGGCGAGCUGCACGCCAUCCUGCGGCGGCAGGAGGACUUCUACCCCUUCCUGAAGGACAACCGGGAGAAGAUCG |
| | | AGAAGAUCCUGACCUUCCGGAUCCCCUACUACGUGGGCCCCCUGGCCCGGGGCAACUCCCGGUUCGCCUGGAUGACCCGGAAGUCCGAGGA |
| | | GACCAUCACCCCCUGGAACUUCGAGGAGGUGGUGGACAAGGGCGCCUCCGCCCAGUCCUUCAUCGAGCGGAUGACCAACUUCGACAAGAAC |
| | | CUGCCCAACGAGAAGGUGCUGCCCAAGCACUCCCUGCUGUACGAGUACUUCACCGUGUACAACGAGCUGACCAAGGUGAAGUACGUGACCG |
| | | AGGGCAUGCGGAAGCCCGCCUUCCUGUCCGGCGAGCAGAAGAAGGCCAUCGUGGACCUGCUGUUCAAGACCAACCGGAAGGUGACCGUGAA |
| | | GCAGCUGAAGGAGGACUACUUCAAGAAGAUCGAGUGCUUCGACUCCGUGGAGAUCUCCGGCGUGGAGGACCGGUUCAACGCCUCCCUGGGC |
| | | ACCUACCACGACCUGCUGAAGAUCAUCAAGGACAAGGACUUCCUGGACAACGAGGAGAACGAGGACAUCCUGGAGGACAUCGUGCUGACCC |
| | | UGACCCUGUUCGAGGACCGGGAGAUGAUCGAGGAGCGGCUGAAGACCUACGCCCACCUGUUCGACGACAAGGUGAUGAAGCAGCUGAAGCG |
| | | GCGGCGGUACACCGGCUGGGGCCGGCUGUCCCGGAAGCUGAUCAACGGCAUCCGGGACAAGCAGUCCGGCAAGACCAUCCUGGACUUCCUG |
| | | AAGUCCGACGGCUUCGCCAACCGGAACUUCAUGCAGCUGAUCCACGACGACUCCCUGACCUUCAAGGAGGACAUCCAGAAGGCCCAGGUGU |
| | | CCGGCCAGGGCGACUCCCUGCACGAGCACAUCGCCAACCUGGCCGGCUCCCCCGCCAUCAAGAAGGGCAUCCUGCAGACCGUGAAGGUGGU |
| | | GGACGAGCUGGUGAAGGUGAUGGGCCGGCACAAGCCCGAGAACAUCGUGAUCGAGAUGGCCCGGGAGAACCAGACCACCCAGAAGGGCCAG |
| | | AAGAACUCCCGGGAGCGGAUGAAGCGGAUCGAGGAGGGCAUCAAGGAGCUGGGCUCCCAGAUCCUGAAGGAGCACCCCGUGGAGAACACCC |
| | | AGCUGCAGAACGAGAAGCUGUACCUGUACUACCUGCAGAACGGCCGGGACAUGUACGUGGACCAGGAGCUGGACAUCAACCGGCUGUCCGA |
| | | CUACGACGUGGACCACAUCGUGCCCCAGUCCUUCCUGAAGGACGACUCCAUCGACAACAAGGUGCUGACCCGGUCCGACAAGAACCGGGGC |
| | | AAGUCCGACAACGUGCCCUCCGAGGAGGUGGUGAAGAAGAUGAAGAACUACUGGCGGCAGCUGCUGAACGCCAAGCUGAUCACCCAGCGGA |
| | | AGUUCGACAACCUGACCAAGGCCGAGCGGGGCGGCCUGUCCGAGCUGGACAAGGCCGGCUUCAUCAAGCGGCAGCUGGUGGAGACCCGGCA |
| | | GAUCACCAAGCACGUGGCCCAGAUCCUGGACUCCCGGAUGAACACCAAGUACGACGAGAACGACAAGCUGAUCCGGGAGGUGAAGGUGAUC |
| | | ACCCUGAAGUCCAAGCUGGUGUCCGACUUCCGGAAGGACUUCCAGUUCUACAAGGUGCGGGAGAUCAACAACUACCACCACGCCCACGACG |
| | | CCUACCUGAACGCCGUGGUGGGCACCGCCCUGAUCAAGAAGUACCCCAAGCUGGAGUCCGAGUUCGUGUACGGCGACUACAAGGUGUACGA |
| | | CGUGCGGAAGAUGAUCGCCAAGUCCGAGCAGGAGAUCGGCAAGGCCACCGCCAAGUACUUCUUCUACUCCAACAUCAUGAACUUCUUCAAG |
| | | ACCGAGAUCACCCUGGCCAACGGCGAGAUCCGGAAGCGGCCCCUGAUCGAGACCAACGGCGAGACCGGCGAGAUCGUGUGGGACAAGGGCC |
| | | GGGACUUCGCCACCGUGCGGAAGGUGCUGUCCAUGCCCCAGGUGAACAUCGUGAAGAAGACCGAGGUGCAGACCGGCGGCUUCUCCAAGGA |
| | | GUCCAUCCUGCCCAAGCGGAACUCCGACAAGCUGAUCGCCCGGAAGAAGGACUGGGACCCCAAGAAGUACGGCGGCUUCGACUCCCCCACC |
| | | GUGGCCUACUCCGUGCUGGUGGUGGCCAAGGUGGAGAAGGGCAAGUCCAAGAAGCUGAAGUCCGUGAAGGAGCUGCUGGGCAUCACCAUCA |
| | | UGGAGCGGUCCUCCUUCGAGAAGAACCCCAUCGACUUCCUGGAGGCCAAGGGCUACAAGGAGGUGAAGAAGGACCUGAUCAUCAAGCUGCC |
| | | CAAGUACUCCCUGUUCGAGCUGGAGAACGGCCGGAAGCGGAUGCUGGCCUCCGCCGGCGAGCUGCAGAAGGGCAACGAGCUGGCCCUGCCC |
| | | UCCAAGUACGUGAACUUCCUGUACCUGGCCUCCCACUACGAGAAGCUGAAGGGCUCCCCCGAGGACAACGAGCAGAAGCAGCUGUUCGUGG |
| | | AGCAGCACAAGCACUACCUGGACGAGAUCAUCGAGCAGAUCUCCGAGUUCUCCAAGCGGGUGAUCCUGGCCGACGCCAACCUGGACAAGGU |
| | | GCUGUCCGCCUACAACAAGCACCGGGACAAGCCCAUCCGGGAGCAGGCCGAGAACAUCAUCCACCUGUUCACCCUGACCAACCUGGGCGCC |
| | | CCCGCCGCCUUCAAGUACUUCGACACCACCAUCGACAAGAAGCGGUACACCUCCACCAAGGAGGUGCUGGACGCCACCCUGAUCCACCAGU |
| | | CCAUCACCGGCCUGUACGAGACCCGGAUCGACCUGUCCCAGCUGGGCGGCGACGGCGCCCCCGAGUCCGCCACCGAGUCCGGCGGCACCUC |
| | | CACCGAGUCCGAGGGCUCCUCCUCCGGUGCCGCCUUCAAGCCCAACCCCAUCAACUACAUCCUGGGCCUGGACAUCGGCAUCGCCUCCGUG |
| | | GGCUGGGCCAUGGUGGAGAUCGACGAGGAGGAGAACCCCAUCCGGCUGAUCGACCUGGGCGUGCGGGUGUUCGAGCGGGCCGAGGUGCCCA |
| | | AGACCGGCGACUCCCUGGCCAUGGCCCGGCGGCUGGCCCGGUCCGUGCGGCGGCUGACCCGGCGGCGGGCCCACCGGCUGCUGCGGGCCCG |
| | | GCGGCUGCUGAAGCGGGAGGGCGUGCUGCAGGCCGCCGACUUCGACGAGAACGGCCUGAUCAAGUCCCUGCCCAACACCCCCUGGCAGCUG |
| | | CGGGCCGCCGCCCUGGACCGGAAGCUGACCCCCCUGGAGUGGUCCGCCGUGCUGCUGCACCUGAUCAAGCACCGGGGCUACCUGUCCCAGC |
| | | GGAAGAACGAGGGCGAGACCGCCGACAAGGAGCUGGGCGCCCUGCUGAAGGGCGUGGCCAACAACGCCCACGCCCUGCAGACCGGCGACUU |
| | | CCGGACCCCCGCCGAGCUGGCCCUGAACAAGUUCGAGAAGGAGUCCGGCCACAUCCGGAACCAGCGGGGCGACUACUCCCACACCUUCUCC |
| | | CGGAAGGACCUGCAGGCCGAGCUGAUCCUGCUGUUCGAGAAGCAGAAGGAGUUCGGCAACCCCCACGUGUCCGGCGGCCUGAAGGAGGGCA |
| | | UCGAGACCCUGCUGAUGACCCAGCGGCCCGCCCUGUCCGGCGACGCCGUGCAGAAGAUGCUGGGCCACUGCACCUUCGAGCCCGCCGAGCC |
| | | CAAGGCCGCCAAGAACACCUACACCGCCGAGCGGUUCAUCUGGCUGACCAAGCUGAACAACCUGCGGAUCCUGGAGCAGGGCUCCGAGCGG |
| | | CCCCUGACCGACACCGAGCGGGCCACCCUGAUGGACGAGCCCUACCGGAAGUCCAAGCUGACCUACGCCCAGGCCCGGAAGCUGCUGGGCC |
| | | UGGAGGACACCGCCUUCUUCAAGGGCCUGCGGUACGGCAAGGACAACGCCGAGGCCUCCACCCUGAUGGAGAUGAAGGCCUACCACGCCAU |
| | | CUCCCGGGCCCUGGAGAAGGAGGGCCUGAAGGACAAGAAGUCCCCCCUGAACCUGUCCUCCGAGCUGCAGGACGAGAUCGGCACCGCCUUC |
| | | UCCCUGUUCAAGACCGACGAGGACAUCACCGGCCGGCUGAAGGACCGGGUGCAGCCCGAGAUCCUGGAGGCCCUGCUGAAGCACAUCUCCU |
| | | UCGACAAGUUCGUGCAGAUCUCCCUGAAGGCCCUGCGGCGGAUCGUGCCCCUGAUGGAGCAGGGCAAGCGGUACGACGAGGCCUGCGCCGA |
| | | GAUCUACGGCGACCACUACGGCAAGAAGAACACCGAGGAGAAGAUCUACCUGCCCCCCAUCCCCGCCGACGAGAUCCGGAACCCCGUGGUG |
| | | CUGCGGGCCCUGUCCCAGGCCCGGAAGGUGAUCAACGGCGUGGUGCGGCGGUACGGCUCCCCCGCCCGGAUCCACAUCGAGACCGCCCGGG |
| | | AGGUGGGCAAGUCCUUCAAGGACCGGAAGGAGAUCGAGAAGCGGCAGGAGGAGAACCGGAAGGACCGGGAGAAGGCCGCCGCCAAGUUCCG |
| | | GGAGUACUUCCCCAACUUCGUGGGCGAGCCCAAGUCCAAGGACAUCCUGAAGCUGCGGCUGUACGAGCAGCAGCACGGCAAGUGCCUGUAC |
| | | UCCGGCAAGGAGAUCAACCUGGUGCGGCUGAACGAGAAGGGCUACGUGGAGAUCGACCACGCCCUGCCCUUCUCCCGGACCUGGGACGACU |
| | | CCUUCAACAACAAGGUGCUGGUGCUGGGCUCCGAGAACCAGAACAAGGGCAACCAGACCCCCUACGAGUACUUCAACGGCAAGGACAACUC |
| | | CCGGGAGUGGCAGGAGUUCAAGGCCCGGGUGGAGACCUCCCGGUUCCCCCGGUCCAAGAAGCAGCGGAUCCUGCUGCAGAAGUUCGACGAG |
| | | GACGGCUUCAAGGAGUGCAACCUGAACGACACCCGGUACGUGAACCGCUUCCUGUGCCAGUUCGUGGCCGACCACAUCCUGCUGACCGGCA |
| | | AGGGCAAGCGGCGGGUGUUCGCCUCCAACGGCCAGAUCACCAACCUGCUGCGGGGCUUCUGGGGCCUGCGGAAGGUGCGGGCCGAGAACGA |
| | | CCGGCACCACGCCCUGGACGCCGUGGUGGUGGCCUGCUCCACCGUGGCCAUGCAGCAGAAGAUCACCCGGUUCGUGCGGUACAAGGAGAUG |
| | | AACGCCUUCGACGGCAAGACCAUCGACAAGGAGACCGGCAAGGUGCUGCACCAGAAGACCCACUUCCCCCAGCCCUGGGAGUUCUUCGCCC |
| | | AGGAGGUGAUGAUCCGGGUGUUCGGCAAGCCCGACGGCAAGCCCGAGUUCGAGGAGGCCGACACCCCCGAGAAGCUGCGGACCCUGCUGGC |
| | | CGAGAAGCUGUCCUCCCGGCCCGAGGCCGUGCACGAGUACGUGACCCCCCUGUUCGUGUCCCGGGCCCCCAACCGGAAGAUGUCCGGCGCC |
| | | CACAAGGACACCCUGCGGUCCGCCAAGCGGUUCGUGAAGCACAACGAGAAGAUCUCCGUGAAGCGGGUGUGGCUGACCGAGAUCAAGCUGG |
| | | CCGACCUGGAGAACAUGGUGAACUACAAGAACGGCCGGGAGAUCGAGCUGUACGAGGCCCUGAAGGCCCGGCUGGAGGCCUACGGCGGCAA |
| | | CGCCAAGCAGGCCUUCGACCCCAAGGACAACCCCUUCUACAAGAAGGGCGGCCAGCUGGUGAAGGCCGUGCGGGUGGAGAAGACCCAGGAG |
| | | UCCGGCGUGCUGCUGAACAAGAAGAACGCCUACACCAUCGCCGACAACGGCGACAUGGUGCGGGUGGACGUGUUCUGCAAGGUGGACAAGA |
| | | AGGGCAAGAACCAGUACUUCAUCGUGCCCAUCUACGCCUGGCAGGUGGCCGAGAACAUCCUGCCCGACAUCGACUGCAAGGGCUACCGGAU |
| | | CGACGACUCCUACACCUUCUGCUUCUCCCUGCACAAGUACGACCUGAUCGCCUUCCAGAAGGACGAGAAGUCCAAGGUGGAGUUCGCCUAC |
| | | UACAUCAACUGCGACUCCUCCAACGGCCGGUUCUACCUGGCCUGGCACGACAAGGGCUCCAAGGAGCAGCAGUUCCGGAUCUCCACCCAGA |
| | | ACCUGGUGCUGAUCCAGAAGUACCAGGUGAACGAGCUGGGCAAGGAGAUCCGGCCCUGCCGGCUGAAGAAGCGGCCCCCCGUGCGGUCCGG |
| | | AAAGCGGACCGCCGACGGCUCCGGAGGAGGAAGCCCGAAGAAGAAGAGAAAGGUCAGCGAAAGCGCAACACCGGAAAGCGUCAGCGGAUGG |
| | | AGACUGUUCAAGAAGAUCAGCUAGCUAGCACCAGCCUCAAGAACACCCGAAUGGAGUCUCUAAGCUACAUAAUACCAACUUACACUUUACA |
| | | AAAUGUUGUCCCCCAAAAUGUAGCCAUUCGUAUCUGCUCCUAAUAAAAAGAAAGUUUCUUCACAUUCUCUCGAGAAAAAAAAAAAAUGGAA |
| | | AAAAAAAAAACGGAAAAAAAAAAAAGGUAAAAAAAAAAAAUAUAAAAAAAAAAAACAUAAAAAAAAAAAACGAAAAAAAAAAAACGUAAAA |
| | | AAAAAAAACUCAAAAAAAAAAAAGAUAAAAAAAAAAAACCUAAAAAAAAAAAAUGUAAAAAAAAAAAAGGGAAAAAAAAAAAACGCAAAAA |
| | | AAAAAAACACAAAAAAAAAAAAUGCAAAAAAAAAAAAUCGAAAAAAAAAAAAUCUAAAAAAAAAAAACGAAAAAAAAAAAACCCAAAAAAA |
| | | AAAAAGACAAAAAAAAAAAAUAGAAAAAAAAAAAAGUUAAAAAAAAAAAACUGAAAAAAAAAAAAUUUAAAAAAAAAAAAUCUAG |
| 74 | Cas9- | AUGGACAAGAAGUACUCCAUCGGCCUGGACAUCGGCACCAACUCCGUGGGCUGGGCCGUGAUCACCGACGAGUACAAGGUGCCCUCCAAGA |
| | Cas9 | AGUUCAAGGUGCUGGGCAACACCGACCGGCACUCCAUCAAGAAGAACCUGAUCGGCGCCCUGCUGUUCGACUCCGGCGAGACCGCCGAGGC |
| | fusion- | CACCCGGCUGAAGCGGACCGCCCGGCGGCGGUACACCCGGCGGAAGAACCGGAUCUGCUACCUGCAGGAGAUCUUCUCCAACGAGAUGGCC |
| | 21 | AAGGUGGACGACUCCUUCUUCCACCGGCUGGAGGAGUCCUUCCUGGUGGAGGAGGACAAGAAGCACGAGCGGCACCCCAUCUUCGGCAACA |
| | amino | UCGUGGACGAGGUGGCCUACCACGAGAAGUACCCCACCAUCUACCACCUGCGGAAGAAGCUGGUGGACUCCACCGACAAGGCCGACCUGCG |
| | acid | GCUGAUCUACCUGGCCCUGGCCCACAUGAUCAAGUUCCGGGGCCACUUCCUGAUCGAGGGCGACCUGAACCCCGACAACUCCGACGUGGAC |
| | residue | AAGCUGUUCAUCCAGCUGGUGCAGACCUACAACCAGCUGUUCGAGGAGAACCCCAUCAACGCCUCCGGCGUGGACGCCAAGGCCAUCCUGU |
| | linker | CCGCCCGGCUGUCCAAGUCCCGGCGGCUGGAGAACCUGAUCGCCCAGCUGCCCGGCGAGAAGAAGAACGGCCUGUUCGGCAACCUGAUCGC |
| | and | CCUGUCCCUGGGCCUGACCCCCAACUUCAAGUCCAACUUCGACCUGGCCGAGGACGCCAAGCUGCAGCUGUCCAAGGACACCUACGACGAC |
| | tag | GACCUGGACAACCUGCUGGCCCAGAUCGGCGACCAGUACGCCGACCUGUUCCUGGCCGCCAAGAACCUGUCCGACGCCAUCCUGCUGUCCG |
| | HiBit | ACAUCCUGCGGGUGAACACCGAGAUCACCAAGGCCCCCCUGUCCGCCUCCAUGAUCAAGCGGUACGACGAGCACCACCAGGACCUGACCCU |
| | (mRNA | GCUGAAGGCCCUGGUGCGGCAGCAGCUGCCCGAGAAGUACAAGGAGAUCUUCUUCGACCAGUCCAAGAACGGCUACGCCGGCUACAUCGAC |
| | T)-ORF | GGCGGCGCCUCCCAGGAGGAGUUCUACAAGUUCAUCAAGCCCAUCCUGGAGAAGAUGGACGGCACCGAGGAGCUGCUGGUGAAGCUGAACC |
| | sequence | GGGAGGACCUGCUGCGGAAGCAGCGGACCUUCGACAACGGCUCCAUCCCCCACCAGAUCCACCUGGGCGAGCUGCACGCCAUCCUGCGGCG |
| | | GCAGGAGGACUUCUACCCCUUCCUGAAGGACAACCGGGAGAAGAUCGAGAAGAUCCUGACCUUCCGGAUCCCCUACUACGUGGGCCCCCUG |
| | | GCCCGGGGCAACUCCCGGUUCGCCUGGAUGACCCGGAAGUCCGAGGAGACCAUCACCCCCUGGAACUUCGAGGAGGUGGUGGACAAGGGCG |
| | | CCUCCGCCCAGUCCUUCAUCGAGCGGAUGACCAACUUCGACAAGAACCUGCCCAACGAGAAGGUGCUGCCCAAGCACUCCCUGCUGUACGA |
| | | GUACUUCACCGUGUACAACGAGCUGACCAAGGUGAAGUACGUGACCGAGGGCAUGCGGAAGCCCGCCUUCCUGUCCGGCGAGCAGAAGAAG |
| | | GCCAUCGUGGACCUGCUGUUCAAGACCAACCGGAAGGUGACCGUGAAGCAGCUGAAGGAGGACUACUUCAAGAAGAUCGAGUGCUUCGACU |
| | | CCGUGGAGAUCUCCGGCGUGGAGGACCGGUUCAACGCCUCCCUGGGCACCUACCACGACCUGCUGAAGAUCAUCAAGGACAAGGACUUCCU |
| | | GGACAACGAGGAGAACGAGGACAUCCUGGAGGACAUCGUGCUGACCCUGACCCUGUUCGAGGACCGGGAGAUGAUCGAGGAGCGGCUGAAG |
| | | ACCUACGCCCACCUGUUCGACGACAAGGUGAUGAAGCAGCUGAAGCGGCGGCGGUACACCGGCUGGGGCCGGCUGUCCCGGAAGCUGAUCA |
| | | ACGGCAUCCGGGACAAGCAGUCCGGCAAGACCAUCCUGGACUUCCUGAAGUCCGACGGCUUCGCCAACCGGAACUUCAUGCAGCUGAUCCA |
| | | CGACGACUCCCUGACCUUCAAGGAGGACAUCCAGAAGGCCCAGGUGUCCGGCCAGGGCGACUCCCUGCACGAGCACAUCGCCAACCUGGCC |
| | | GGCUCCCCCGCCAUCAAGAAGGGCAUCCUGCAGACCGUGAAGGUGGUGGACGAGCUGGUGAAGGUGAUGGGCCGGCACAAGCCCGAGAACA |
| | | UCGUGAUCGAGAUGGCCCGGGAGAACCAGACCACCCAGAAGGGCCAGAAGAACUCCCGGGAGCGGAUGAAGCGGAUCGAGGAGGGCAUCAA |
| | | GGAGCUGGGCUCCCAGAUCCUGAAGGAGCACCCCGUGGAGAACACCCAGCUGCAGAACGAGAAGCUGUACCUGUACUACCUGCAGAACGGC |
| | | CGGGACAUGUACGUGGACCAGGAGCUGGACAUCAACCGGCUGUCCGACUACGACGUGGACCACAUCGUGCCCCAGUCCUUCCUGAAGGACG |
| | | ACUCCAUCGACAACAAGGUGCUGACCCGGUCCGACAAGAACCGGGGCAAGUCCGACAACGUGCCCUCCGAGGAGGUGGUGAAGAAGAUGAA |
| | | GAACUACUGGCGGCAGCUGCUGAACGCCAAGCUGAUCACCCAGCGGAAGUUCGACAACCUGACCAAGGCCGAGCGGGGCGGCCUGUCCGAG |
| | | CUGGACAAGGCCGGCUUCAUCAAGCGGCAGCUGGUGGAGACCCGGCAGAUCACCAAGCACGUGGCCCAGAUCCUGGACUCCCGGAUGAACA |
| | | CCAAGUACGACGAGAACGACAAGCUGAUCCGGGAGGUGAAGGUGAUCACCCUGAAGUCCAAGCUGGUGUCCGACUUCCGGAAGGACUUCCA |
| | | GUUCUACAAGGUGCGGGAGAUCAACAACUACCACCACGCCCACGACGCCUACCUGAACGCCGUGGUGGGCACCGCCCUGAUCAAGAAGUAC |
| | | CCCAAGCUGGAGUCCGAGUUCGUGUACGGCGACUACAAGGUGUACGACGUGCGGAAGAUGAUCGCCAAGUCCGAGCAGGAGAUCGGCAAGG |
| | | CCACCGCCAAGUACUUCUUCUACUCCAACAUCAUGAACUUCUUCAAGACCGAGAUCACCCUGGCCAACGGCGAGAUCCGGAAGCGGCCCCU |
| | | GAUCGAGACCAACGGCGAGACCGGCGAGAUCGUGUGGGACAAGGGCCGGGACUUCGCCACCGUGCGGAAGGUGCUGUCCAUGCCCCAGGUG |
| | | AACAUCGUGAAGAAGACCGAGGUGCAGACCGGCGGCUUCUCCAAGGAGUCCAUCCUGCCCAAGCGGAACUCCGACAAGCUGAUCGCCCGGA |
| | | AGAAGGACUGGGACCCCAAGAAGUACGGCGGCUUCGACUCCCCCACCGUGGCCUACUCCGUGCUGGUGGUGGCCAAGGUGGAGAAGGGCAA |
| | | GUCCAAGAAGCUGAAGUCCGUGAAGGAGCUGCUGGGCAUCACCAUCAUGGAGCGGUCCUCCUUCGAGAAGAACCCCAUCGACUUCCUGGAG |
| | | GCCAAGGGCUACAAGGAGGUGAAGAAGGACCUGAUCAUCAAGCUGCCCAAGUACUCCCUGUUCGAGCUGGAGAACGGCCGGAAGCGGAUGC |
| | | UGGCCUCCGCCGGCGAGCUGCAGAAGGGCAACGAGCUGGCCCUGCCCUCCAAGUACGUGAACUUCCUGUACCUGGCCUCCCACUACGAGAA |
| | | GCUGAAGGGCUCCCCCGAGGACAACGAGCAGAAGCAGCUGUUCGUGGAGCAGCACAAGCACUACCUGGACGAGAUCAUCGAGCAGAUCUCC |
| | | GAGUUCUCCAAGCGGGUGAUCCUGGCCGACGCCAACCUGGACAAGGUGCUGUCCGCCUACAACAAGCACCGGGACAAGCCCAUCCGGGAGC |
| | | AGGCCGAGAACAUCAUCCACCUGUUCACCCUGACCAACCUGGGCGCCCCCGCCGCCUUCAAGUACUUCGACACCACCAUCGACAAGAAGCG |
| | | GUACACCUCCACCAAGGAGGUGCUGGACGCCACCCUGAUCCACCAGUCCAUCACCGGCCUGUACGAGACCCGGAUCGACCUGUCCCAGCUG |
| | | GGCGGCGACGGCGCCCCCGAGUCCGCCACCGAGUCCGGCGGCACCUCCACCGAGUCCGAGGGCUCCUCCUCCGGUGCCGCCUUCAAGCCCA |
| | | ACCCCAUCAACUACAUCCUGGGCCUGGACAUCGGCAUCGCCUCCGUGGGCUGGGCCAUGGUGGAGAUCGACGAGGAGGAGAACCCCAUCCG |
| | | GCUGAUCGACCUGGGCGUGCGGGUGUUCGAGCGGGCCGAGGUGCCCAAGACCGGCGACUCCCUGGCCAUGGCCCGGCGGCUGGCCCGGUCC |
| | | GUGCGGCGGCUGACCCGGCGGCGGGCCCACCGGCUGCUGCGGGCCCGGCGGCUGCUGAAGCGGGAGGGCGUGCUGCAGGCCGCCGACUUCG |
| | | ACGAGAACGGCCUGAUCAAGUCCCUGCCCAACACCCCCUGGCAGCUGCGGGCCGCCGCCCUGGACCGGAAGCUGACCCCCCUGGAGUGGUC |
| | | CGCCGUGCUGCUGCACCUGAUCAAGCACCGGGGCUACCUGUCCCAGCGGAAGAACGAGGGCGAGACCGCCGACAAGGAGCUGGGCGCCCUG |
| | | CUGAAGGGCGUGGCCAACAACGCCCACGCCCUGCAGACCGGCGACUUCCGGACCCCCGCCGAGCUGGCCCUGAACAAGUUCGAGAAGGAGU |
| | | CCGGCCACAUCCGGAACCAGCGGGGCGACUACUCCCACACCUUCUCCCGGAAGGACCUGCAGGCCGAGCUGAUCCUGCUGUUCGAGAAGCA |
| | | GAAGGAGUUCGGCAACCCCCACGUGUCCGGCGGCCUGAAGGAGGGCAUCGAGACCCUGCUGAUGACCCAGCGGCCCGCCCUGUCCGGCGAC |
| | | GCCGUGCAGAAGAUGCUGGGCCACUGCACCUUCGAGCCCGCCGAGCCCAAGGCCGCCAAGAACACCUACACCGCCGAGCGGUUCAUCUGGC |
| | | UGACCAAGCUGAACAACCUGCGGAUCCUGGAGCAGGGCUCCGAGCGGCCCCUGACCGACACCGAGCGGGCCACCCUGAUGGACGAGCCCUA |
| | | CCGGAAGUCCAAGCUGACCUACGCCCAGGCCCGGAAGCUGCUGGGCCUGGAGGACACCGCCUUCUUCAAGGGCCUGCGGUACGGCAAGGAC |
| | | AACGCCGAGGCCUCCACCCUGAUGGAGAUGAAGGCCUACCACGCCAUCUCCCGGGCCCUGGAGAAGGAGGGCCUGAAGGACAAGAAGUCCC |
| | | CCCUGAACCUGUCCUCCGAGCUGCAGGACGAGAUCGGCACCGCCUUCUCCCUGUUCAAGACCGACGAGGACAUCACCGGCCGGCUGAAGGA |
| | | CCGGGUGCAGCCCGAGAUCCUGGAGGCCCUGCUGAAGCACAUCUCCUUCGACAAGUUCGUGCAGAUCUCCCUGAAGGCCCUGCGGCGGAUC |
| | | GUGCCCCUGAUGGAGCAGGGCAAGCGGUACGACGAGGCCUGCGCCGAGAUCUACGGCGACCACUACGGCAAGAAGAACACCGAGGAGAAGA |
| | | UCUACCUGCCCCCCAUCCCCGCCGACGAGAUCCGGAACCCCGUGGUGCUGCGGGCCCUGUCCCAGGCCCGGAAGGUGAUCAACGGCGUGGU |
| | | GCGGCGGUACGGCUCCCCCGCCCGGAUCCACAUCGAGACCGCCCGGGAGGUGGGCAAGUCCUUCAAGGACCGGAAGGAGAUCGAGAAGCGG |
| | | CAGGAGGAGAACCGGAAGGACCGGGAGAAGGCCGCCGCCAAGUUCCGGGAGUACUUCCCCAACUUCGUGGGCGAGCCCAAGUCCAAGGACA |
| | | UCCUGAAGCUGCGGCUGUACGAGCAGCAGCACGGCAAGUGCCUGUACUCCGGCAAGGAGAUCAACCUGGUGCGGCUGAACGAGAAGGGCUA |
| | | CGUGGAGAUCGACCACGCCCUGCCCUUCUCCCGGACCUGGGACGACUCCUUCAACAACAAGGUGCUGGUGCUGGGCUCCGAGAACCAGAAC |
| | | AAGGGCAACCAGACCCCCUACGAGUACUUCAACGGCAAGGACAACUCCCGGGAGUGGCAGGAGUUCAAGGCCCGGGUGGAGACCUCCCGGU |
| | | UCCCCCGGUCCAAGAAGCAGCGGAUCCUGCUGCAGAAGUUCGACGAGGACGGCUUCAAGGAGUGCAACCUGAACGACACCCGGUACGUGAA |
| | | CCGCUUCCUGUGCCAGUUCGUGGCCGACCACAUCCUGCUGACCGGCAAGGGCAAGCGGCGGGUGUUCGCCUCCAACGGCCAGAUCACCAAC |
| | | CUGCUGCGGGGCUUCUGGGGCCUGCGGAAGGUGCGGGCCGAGAACGACCGGCACCACGCCCUGGACGCCGUGGUGGUGGCCUGCUCCACCG |
| | | UGGCCAUGCAGCAGAAGAUCACCCGGUUCGUGCGGUACAAGGAGAUGAACGCCUUCGACGGCAAGACCAUCGACAAGGAGACCGGCAAGGU |
| | | GCUGCACCAGAAGACCCACUUCCCCCAGCCCUGGGAGUUCUUCGCCCAGGAGGUGAUGAUCCGGGUGUUCGGCAAGCCCGACGGCAAGCCC |
| | | GAGUUCGAGGAGGCCGACACCCCCGAGAAGCUGCGGACCCUGCUGGCCGAGAAGCUGUCCUCCCGGCCCGAGGCCGUGCACGAGUACGUGA |
| | | CCCCCCUGUUCGUGUCCCGGGCCCCCAACCGGAAGAUGUCCGGCGCCCACAAGGACACCCUGCGGUCCGCCAAGCGGUUCGUGAAGCACAA |
| | | CGAGAAGAUCUCCGUGAAGCGGGUGUGGCUGACCGAGAUCAAGCUGGCCGACCUGGAGAACAUGGUGAACUACAAGAACGGCCGGGAGAUC |
| | | GAGCUGUACGAGGCCCUGAAGGCCCGGCUGGAGGCCUACGGCGGCAACGCCAAGCAGGCCUUCGACCCCAAGGACAACCCCUUCUACAAGA |
| | | AGGGCGGCCAGCUGGUGAAGGCCGUGCGGGUGGAGAAGACCCAGGAGUCCGGCGUGCUGCUGAACAAGAAGAACGCCUACACCAUCGCCGA |
| | | CAACGGCGACAUGGUGCGGGUGGACGUGUUCUGCAAGGUGGACAAGAAGGGCAAGAACCAGUACUUCAUCGUGCCCAUCUACGCCUGGCAG |
| | | GUGGCCGAGAACAUCCUGCCCGACAUCGACUGCAAGGGCUACCGGAUCGACGACUCCUACACCUUCUGCUUCUCCCUGCACAAGUACGACC |
| | | UGAUCGCCUUCCAGAAGGACGAGAAGUCCAAGGUGGAGUUCGCCUACUACAUCAACUGCGACUCCUCCAACGGCCGGUUCUACCUGGCCUG |
| | | GCACGACAAGGGCUCCAAGGAGCAGCAGUUCCGGAUCUCCACCCAGAACCUGGUGCUGAUCCAGAAGUACCAGGUGAACGAGCUGGGCAAG |
| | | GAGAUCCGGCCCUGCCGGCUGAAGAAGCGGCCCCCCGUGCGGUCCGGAAAGCGGACCGCCGACGGCUCCGGAGGAGGAAGCCCGAAGAAGA |
| | | AGAGAAAGGUCAGCGAAAGCGCAACACCGGAAAGCGUCAGCGGAUGGAGACUGUUCAAGAAGAUCAGCUAG |
| 75 | Cas9- | MDKKYSIGLDIGTNSVGWAVITDEYKVPSKKFKVLGNTDRHSIKKNLIGALLFDSGETAEATRLKRTARRRYTRRKNRICYLQEIFSNEMA |
| | Cas9 | KVDDSFFHRLEESFLVEEDKKHERHPIFGNIVDEVAYHEKYPTIYHLRKKLVDSTDKADLRLIYLALAHMIKFRGHFLIEGDLNPDNSDVD |
| | fusion- | KLFIQLVQTYNQLFEENPINASGVDAKAILSARLSKSRRLENLIAQLPGEKKNGLFGNLIALSLGLTPNFKSNFDLAEDAKLQLSKDTYDD |
| | 21 | DLDNLLAQIGDQYADLFLAAKNLSDAILLSDILRVNTEITKAPLSASMIKRYDEHHQDLTLLKALVRQQLPEKYKEIFFDQSKNGYAGYID |
| | amino | GGASQEEFYKFIKPILEKMDGTEELLVKLNREDLLRKQRTFDNGSIPHQIHLGELHAILRRQEDFYPFLKDNREKIEKILTFRIPYYVGPL |
| | acid | ARGNSRFAWMTRKSEETITPWNFEEVVDKGASAQSFIERMTNFDKNLPNEKVLPKHSLLYEYFTVYNELTKVKYVTEGMRKPAFLSGEQKK |
| | residue | AIVDLLFKTNRKVTVKQLKEDYFKKIECFDSVEISGVEDRFNASLGTYHDLLKIIKDKDFLDNEENEDILEDIVLTLTLFEDREMIEERLK |
| | linker | TYAHLFDDKVMKQLKRRRYTGWGRLSRKLINGIRDKQSGKTILDFLKSDGFANRNFMQLIHDDSLTFKEDIQKAQVSGQGDSLHEHIANLA |
| | and | GSPAIKKGILQTVKVVDELVKVMGRHKPENIVIEMARENQTTQKGQKNSRERMKRIEEGIKELGSQILKEHPVENTQLQNEKLYLYYLQNG |
| | HiBit | RDMYVDQELDINRLSDYDVDHIVPQSFLKDDSIDNKVLTRSDKNRGKSDNVPSEEVVKKMKNYWRQLLNAKLITQRKFDNLTKAERGGLSE |
| | tag | LDKAGFIKRQLVETRQITKHVAQILDSRMNTKYDENDKLIREVKVITLKSKLVSDFRKDFQFYKVREINNYHHAHDAYLNAVVGTALIKKY |
| | (mRNA | PKLESEFVYGDYKVYDVRKMIAKSEQEIGKATAKYFFYSNIMNFFKTEITLANGEIRKRPLIETNGETGEIVWDKGRDFATVRKVLSMPQV |
| | T)- | NIVKKTEVQTGGFSKESILPKRNSDKLIARKKDWDPKKYGGFDSPTVAYSVLVVAKVEKGKSKKLKSVKELLGITIMERSSFEKNPIDFLE |
| | amino | AKGYKEVKKDLIIKLPKYSLFELENGRKRMLASAGELQKGNELALPSKYVNFLYLASHYEKLKGSPEDNEQKQLFVEQHKHYLDEIIEQIS |
| | acid | EFSKRVILADANLDKVLSAYNKHRDKPIREQAENIIHLFTLTNLGAPAAFKYFDTTIDKKRYTSTKEVLDATLIHQSITGLYETRIDLSQL |
| | sequence | GGDGAPESATESGGTSTESEGSSSGAAFKPNPINYILGLDIGIASVGWAMVEIDEEENPIRLIDLGVRVFERAEVPKTGDSLAMARRLARS |
| | | VRRLTRRRAHRLLRARRLLKREGVLQAADFDENGLIKSLPNTPWQLRAAALDRKLTPLEWSAVLLHLIKHRGYLSQRKNEGETADKELGAL |
| | | LKGVANNAHALQTGDFRTPAELALNKFEKESGHIRNQRGDYSHTFSRKDLQAELILLFEKQKEFGNPHVSGGLKEGIETLLMTQRPALSGD |
| | | AVQKMLGHCTFEPAEPKAAKNTYTAERFIWLTKLNNLRILEQGSERPLTDTERATLMDEPYRKSKLTYAQARKLLGLEDTAFFKGLRYGKD |
| | | NAEASTLMEMKAYHAISRALEKEGLKDKKSPLNLSSELQDEIGTAFSLFKTDEDITGRLKDRVQPEILEALLKHISFDKFVQISLKALRRI |
| | | VPLMEQGKRYDEACAEIYGDHYGKKNTEEKIYLPPIPADEIRNPVVLRALSQARKVINGVVRRYGSPARIHIETAREVGKSFKDRKEIEKR |
| | | QEENRKDREKAAAKFREYFPNFVGEPKSKDILKLRLYEQQHGKCLYSGKEINLVRLNEKGYVEIDHALPFSRTWDDSFNNKVLVLGSENQN |
| | | KGNQTPYEYFNGKDNSREWQEFKARVETSRFPRSKKQRILLQKFDEDGFKECNLNDTRYVNRFLCQFVADHILLTGKGKRRVFASNGQITN |
| | | LLRGFWGLRKVRAENDRHHALDAVVVACSTVAMQQKITRFVRYKEMNAFDGKTIDKETGKVLHQKTHFPQPWEFFAQEVMIRVFGKPDGKP |
| | | EFEEADTPEKLRTLLAEKLSSRPEAVHEYVTPLFVSRAPNRKMSGAHKDTLRSAKRFVKHNEKISVKRVWLTEIKLADLENMVNYKNGREI |
| | | ELYEALKARLEAYGGNAKQAFDPKDNPFYKKGGQLVKAVRVEKTQESGVLLNKKNAYTIADNGDMVRVDVFCKVDKKGKNQYFIVPIYAWQ |
| | | VAENILPDIDCKGYRIDDSYTFCFSLHKYDLIAFQKDEKSKVEFAYYINCDSSNGRFYLAWHDKGSKEQQFRISTQNLVLIQKYQVNELGK |
| | | EIRPCRLKKRPPVRSGKRTADGSGGGSPKKKRKVSESATPESVSGWRLFKKIS* |
| 76 | Cas9- | AUGGACAAGAAGUACUCCAUCGGCCUGGACAUCGGCACCAACUCCGUGGGCUGGGCCGUGAUCACCGACGAGUACAAGGUGCCCUCCAAGA |
| | Cas9 | AGUUCAAGGUGCUGGGCAACACCGACCGGCACUCCAUCAAGAAGAACCUGAUCGGCGCCCUGCUGUUCGACUCCGGCGAGACCGCCGAGGC |
| | fusion- | CACCCGGCUGAAGCGGACCGCCCGGCGGCGGUACACCCGGCGGAAGAACCGGAUCUGCUACCUGCAGGAGAUCUUCUCCAACGAGAUGGCC |
| | 21 | AAGGUGGACGACUCCUUCUUCCACCGGCUGGAGGAGUCCUUCCUGGUGGAGGAGGACAAGAAGCACGAGCGGCACCCCAUCUUCGGCAACA |
| | amino | UCGUGGACGAGGUGGCCUACCACGAGAAGUACCCCACCAUCUACCACCUGCGGAAGAAGCUGGUGGACUCCACCGACAAGGCCGACCUGCG |
| | acid | GCUGAUCUACCUGGCCCUGGCCCACAUGAUCAAGUUCCGGGGCCACUUCCUGAUCGAGGGCGACCUGAACCCCGACAACUCCGACGUGGAC |
| | residual | AAGCUGUUCAUCCAGCUGGUGCAGACCUACAACCAGCUGUUCGAGGAGAACCCCAUCAACGCCUCCGGCGUGGACGCCAAGGCCAUCCUGU |
| | linker | CCGCCCGGCUGUCCAAGUCCCGGCGGCUGGAGAACCUGAUCGCCCAGCUGCCCGGCGAGAAGAAGAACGGCCUGUUCGGCAACCUGAUCGC |
| | (mRNA | CCUGUCCCUGGGCCUGACCCCCAACUUCAAGUCCAACUUCGACCUGGCCGAGGACGCCAAGCUGCAGCUGUCCAAGGACACCUACGACGAC |
| | T)- | GACCUGGACAACCUGCUGGCCCAGAUCGGCGACCAGUACGCCGACCUGUUCCUGGCCGCCAAGAACCUGUCCGACGCCAUCCUGCUGUCCG |
| | mRNA | ACAUCCUGCGGGUGAACACCGAGAUCACCAAGGCCCCCCUGUCCGCCUCCAUGAUCAAGCGGUACGACGAGCACCACCAGGACCUGACCCU |
| | sequence | GCUGAAGGCCCUGGUGCGGCAGCAGCUGCCCGAGAAGUACAAGGAGAUCUUCUUCGACCAGUCCAAGAACGGCUACGCCGGCUACAUCGAC |
| | | GGCGGCGCCUCCCAGGAGGAGUUCUACAAGUUCAUCAAGCCCAUCCUGGAGAAGAUGGACGGCACCGAGGAGCUGCUGGUGAAGCUGAACC |
| | | GGGAGGACCUGCUGCGGAAGCAGCGGACCUUCGACAACGGCUCCAUCCCCCACCAGAUCCACCUGGGCGAGCUGCACGCCAUCCUGCGGCG |
| | | GCAGGAGGACUUCUACCCCUUCCUGAAGGACAACCGGGAGAAGAUCGAGAAGAUCCUGACCUUCCGGAUCCCCUACUACGUGGGCCCCCUG |
| | | GCCCGGGGCAACUCCCGGUUCGCCUGGAUGACCCGGAAGUCCGAGGAGACCAUCACCCCCUGGAACUUCGAGGAGGUGGUGGACAAGGGCG |
| | | CCUCCGCCCAGUCCUUCAUCGAGCGGAUGACCAACUUCGACAAGAACCUGCCCAACGAGAAGGUGCUGCCCAAGCACUCCCUGCUGUACGA |
| | | GUACUUCACCGUGUACAACGAGCUGACCAAGGUGAAGUACGUGACCGAGGGCAUGCGGAAGCCCGCCUUCCUGUCCGGCGAGCAGAAGAAG |
| | | GCCAUCGUGGACCUGCUGUUCAAGACCAACCGGAAGGUGACCGUGAAGCAGCUGAAGGAGGACUACUUCAAGAAGAUCGAGUGCUUCGACU |
| | | CCGUGGAGAUCUCCGGCGUGGAGGACCGGUUCAACGCCUCCCUGGGCACCUACCACGACCUGCUGAAGAUCAUCAAGGACAAGGACUUCCU |
| | | GGACAACGAGGAGAACGAGGACAUCCUGGAGGACAUCGUGCUGACCCUGACCCUGUUCGAGGACCGGGAGAUGAUCGAGGAGCGGCUGAAG |
| | | ACCUACGCCCACCUGUUCGACGACAAGGUGAUGAAGCAGCUGAAGCGGCGGCGGUACACCGGCUGGGGCCGGCUGUCCCGGAAGCUGAUCA |
| | | ACGGCAUCCGGGACAAGCAGUCCGGCAAGACCAUCCUGGACUUCCUGAAGUCCGACGGCUUCGCCAACCGGAACUUCAUGCAGCUGAUCCA |
| | | CGACGACUCCCUGACCUUCAAGGAGGACAUCCAGAAGGCCCAGGUGUCCGGCCAGGGCGACUCCCUGCACGAGCACAUCGCCAACCUGGCC |
| | | GGCUCCCCCGCCAUCAAGAAGGGCAUCCUGCAGACCGUGAAGGUGGUGGACGAGCUGGUGAAGGUGAUGGGCCGGCACAAGCCCGAGAACA |
| | | UCGUGAUCGAGAUGGCCCGGGAGAACCAGACCACCCAGAAGGGCCAGAAGAACUCCCGGGAGCGGAUGAAGCGGAUCGAGGAGGGCAUCAA |
| | | GGAGCUGGGCUCCCAGAUCCUGAAGGAGCACCCCGUGGAGAACACCCAGCUGCAGAACGAGAAGCUGUACCUGUACUACCUGCAGAACGGC |
| | | CGGGACAUGUACGUGGACCAGGAGCUGGACAUCAACCGGCUGUCCGACUACGACGUGGACCACAUCGUGCCCCAGUCCUUCCUGAAGGACG |
| | | ACUCCAUCGACAACAAGGUGCUGACCCGGUCCGACAAGAACCGGGGCAAGUCCGACAACGUGCCCUCCGAGGAGGUGGUGAAGAAGAUGAA |
| | | GAACUACUGGCGGCAGCUGCUGAACGCCAAGCUGAUCACCCAGCGGAAGUUCGACAACCUGACCAAGGCCGAGCGGGGCGGCCUGUCCGAG |
| | | CUGGACAAGGCCGGCUUCAUCAAGCGGCAGCUGGUGGAGACCCGGCAGAUCACCAAGCACGUGGCCCAGAUCCUGGACUCCCGGAUGAACA |
| | | CCAAGUACGACGAGAACGACAAGCUGAUCCGGGAGGUGAAGGUGAUCACCCUGAAGUCCAAGCUGGUGUCCGACUUCCGGAAGGACUUCCA |
| | | GUUCUACAAGGUGCGGGAGAUCAACAACUACCACCACGCCCACGACGCCUACCUGAACGCCGUGGUGGGCACCGCCCUGAUCAAGAAGUAC |
| | | CCCAAGCUGGAGUCCGAGUUCGUGUACGGCGACUACAAGGUGUACGACGUGCGGAAGAUGAUCGCCAAGUCCGAGCAGGAGAUCGGCAAGG |
| | | CCACCGCCAAGUACUUCUUCUACUCCAACAUCAUGAACUUCUUCAAGACCGAGAUCACCCUGGCCAACGGCGAGAUCCGGAAGCGGCCCCU |
| | | GAUCGAGACCAACGGCGAGACCGGCGAGAUCGUGUGGGACAAGGGCCGGGACUUCGCCACCGUGCGGAAGGUGCUGUCCAUGCCCCAGGUG |
| | | AACAUCGUGAAGAAGACCGAGGUGCAGACCGGCGGCUUCUCCAAGGAGUCCAUCCUGCCCAAGCGGAACUCCGACAAGCUGAUCGCCCGGA |
| | | AGAAGGACUGGGACCCCAAGAAGUACGGCGGCUUCGACUCCCCCACCGUGGCCUACUCCGUGCUGGUGGUGGCCAAGGUGGAGAAGGGCAA |
| | | GUCCAAGAAGCUGAAGUCCGUGAAGGAGCUGCUGGGCAUCACCAUCAUGGAGCGGUCCUCCUUCGAGAAGAACCCCAUCGACUUCCUGGAG |
| | | GCCAAGGGCUACAAGGAGGUGAAGAAGGACCUGAUCAUCAAGCUGCCCAAGUACUCCCUGUUCGAGCUGGAGAACGGCCGGAAGCGGAUGC |
| | | UGGCCUCCGCCGGCGAGCUGCAGAAGGGCAACGAGCUGGCCCUGCCCUCCAAGUACGUGAACUUCCUGUACCUGGCCUCCCACUACGAGAA |
| | | GCUGAAGGGCUCCCCCGAGGACAACGAGCAGAAGCAGCUGUUCGUGGAGCAGCACAAGCACUACCUGGACGAGAUCAUCGAGCAGAUCUCC |
| | | GAGUUCUCCAAGCGGGUGAUCCUGGCCGACGCCAACCUGGACAAGGUGCUGUCCGCCUACAACAAGCACCGGGACAAGCCCAUCCGGGAGC |
| | | AGGCCGAGAACAUCAUCCACCUGUUCACCCUGACCAACCUGGGCGCCCCCGCCGCCUUCAAGUACUUCGACACCACCAUCGACAAGAAGCG |
| | | GUACACCUCCACCAAGGAGGUGCUGGACGCCACCCUGAUCCACCAGUCCAUCACCGGCCUGUACGAGACCCGGAUCGACCUGUCCCAGCUG |
| | | GGCGGCGACGGCGCCCCCGAGUCCGCCACCGAGUCCGGCGGCACCUCCACCGAGUCCGAGGGCUCCUCCUCCGGUGCCGCCUUCAAGCCCA |
| | | ACCCCAUCAACUACAUCCUGGGCCUGGACAUCGGCAUCGCCUCCGUGGGCUGGGCCAUGGUGGAGAUCGACGAGGAGGAGAACCCCAUCCG |
| | | GCUGAUCGACCUGGGCGUGCGGGUGUUCGAGCGGGCCGAGGUGCCCAAGACCGGCGACUCCCUGGCCAUGGCCCGGCGGCUGGCCCGGUCC |
| | | GUGCGGCGGCUGACCCGGCGGCGGGCCCACCGGCUGCUGCGGGCCCGGCGGCUGCUGAAGCGGGAGGGCGUGCUGCAGGCCGCCGACUUCG |
| | | ACGAGAACGGCCUGAUCAAGUCCCUGCCCAACACCCCCUGGCAGCUGCGGGCCGCCGCCCUGGACCGGAAGCUGACCCCCCUGGAGUGGUC |
| | | CGCCGUGCUGCUGCACCUGAUCAAGCACCGGGGCUACCUGUCCCAGCGGAAGAACGAGGGCGAGACCGCCGACAAGGAGCUGGGCGCCCUG |
| | | CUGAAGGGCGUGGCCAACAACGCCCACGCCCUGCAGACCGGCGACUUCCGGACCCCCGCCGAGCUGGCCCUGAACAAGUUCGAGAAGGAGU |
| | | CCGGCCACAUCCGGAACCAGCGGGGCGACUACUCCCACACCUUCUCCCGGAAGGACCUGCAGGCCGAGCUGAUCCUGCUGUUCGAGAAGCA |
| | | GAAGGAGUUCGGCAACCCCCACGUGUCCGGCGGCCUGAAGGAGGGCAUCGAGACCCUGCUGAUGACCCAGCGGCCCGCCCUGUCCGGCGAC |
| | | GCCGUGCAGAAGAUGCUGGGCCACUGCACCUUCGAGCCCGCCGAGCCCAAGGCCGCCAAGAACACCUACACCGCCGAGCGGUUCAUCUGGC |
| | | UGACCAAGCUGAACAACCUGCGGAUCCUGGAGCAGGGCUCCGAGCGGCCCCUGACCGACACCGAGCGGGCCACCCUGAUGGACGAGCCCUA |
| | | CCGGAAGUCCAAGCUGACCUACGCCCAGGCCCGGAAGCUGCUGGGCCUGGAGGACACCGCCUUCUUCAAGGGCCUGCGGUACGGCAAGGAC |
| | | AACGCCGAGGCCUCCACCCUGAUGGAGAUGAAGGCCUACCACGCCAUCUCCCGGGCCCUGGAGAAGGAGGGCCUGAAGGACAAGAAGUCCC |
| | | CCCUGAACCUGUCCUCCGAGCUGCAGGACGAGAUCGGCACCGCCUUCUCCCUGUUCAAGACCGACGAGGACAUCACCGGCCGGCUGAAGGA |
| | | CCGGGUGCAGCCCGAGAUCCUGGAGGCCCUGCUGAAGCACAUCUCCUUCGACAAGUUCGUGCAGAUCUCCCUGAAGGCCCUGCGGCGGAUC |
| | | GUGCCCCUGAUGGAGCAGGGCAAGCGGUACGACGAGGCCUGCGCCGAGAUCUACGGCGACCACUACGGCAAGAAGAACACCGAGGAGAAGA |
| | | UCUACCUGCCCCCCAUCCCCGCCGACGAGAUCCGGAACCCCGUGGUGCUGCGGGCCCUGUCCCAGGCCCGGAAGGUGAUCAACGGCGUGGU |
| | | GCGGCGGUACGGCUCCCCCGCCCGGAUCCACAUCGAGACCGCCCGGGAGGUGGGCAAGUCCUUCAAGGACCGGAAGGAGAUCGAGAAGCGG |
| | | CAGGAGGAGAACCGGAAGGACCGGGAGAAGGCCGCCGCCAAGUUCCGGGAGUACUUCCCCAACUUCGUGGGCGAGCCCAAGUCCAAGGACA |
| | | UCCUGAAGCUGCGGCUGUACGAGCAGCAGCACGGCAAGUGCCUGUACUCCGGCAAGGAGAUCAACCUGGUGCGGCUGAACGAGAAGGGCUA |
| | | CGUGGAGAUCGACCACGCCCUGCCCUUCUCCCGGACCUGGGACGACUCCUUCAACAACAAGGUGCUGGUGCUGGGCUCCGAGAACCAGAAC |
| | | AAGGGCAACCAGACCCCCUACGAGUACUUCAACGGCAAGGACAACUCCCGGGAGUGGCAGGAGUUCAAGGCCCGGGUGGAGACCUCCCGGU |
| | | UCCCCCGGUCCAAGAAGCAGCGGAUCCUGCUGCAGAAGUUCGACGAGGACGGCUUCAAGGAGUGCAACCUGAACGACACCCGGUACGUGAA |
| | | CCGCUUCCUGUGCCAGUUCGUGGCCGACCACAUCCUGCUGACCGGCAAGGGCAAGCGGCGGGUGUUCGCCUCCAACGGCCAGAUCACCAAC |
| | | CUGCUGCGGGGCUUCUGGGGCCUGCGGAAGGUGCGGGCCGAGAACGACCGGCACCACGCCCUGGACGCCGUGGUGGUGGCCUGCUCCACCG |
| | | UGGCCAUGCAGCAGAAGAUCACCCGGUUCGUGCGGUACAAGGAGAUGAACGCCUUCGACGGCAAGACCAUCGACAAGGAGACCGGCAAGGU |
| | | GCUGCACCAGAAGACCCACUUCCCCCAGCCCUGGGAGUUCUUCGCCCAGGAGGUGAUGAUCCGGGUGUUCGGCAAGCCCGACGGCAAGCCC |
| | | GAGUUCGAGGAGGCCGACACCCCCGAGAAGCUGCGGACCCUGCUGGCCGAGAAGCUGUCCUCCCGGCCCGAGGCCGUGCACGAGUACGUGA |
| | | CCCCCCUGUUCGUGUCCCGGGCCCCCAACCGGAAGAUGUCCGGCGCCCACAAGGACACCCUGCGGUCCGCCAAGCGGUUCGUGAAGCACAA |
| | | CGAGAAGAUCUCCGUGAAGCGGGUGUGGCUGACCGAGAUCAAGCUGGCCGACCUGGAGAACAUGGUGAACUACAAGAACGGCCGGGAGAUC |
| | | GAGCUGUACGAGGCCCUGAAGGCCCGGCUGGAGGCCUACGGCGGCAACGCCAAGCAGGCCUUCGACCCCAAGGACAACCCCUUCUACAAGA |
| | | AGGGCGGCCAGCUGGUGAAGGCCGUGCGGGUGGAGAAGACCCAGGAGUCCGGCGUGCUGCUGAACAAGAAGAACGCCUACACCAUCGCCGA |
| | | CAACGGCGACAUGGUGCGGGUGGACGUGUUCUGCAAGGUGGACAAGAAGGGCAAGAACCAGUACUUCAUCGUGCCCAUCUACGCCUGGCAG |
| | | GUGGCCGAGAACAUCCUGCCCGACAUCGACUGCAAGGGCUACCGGAUCGACGACUCCUACACCUUCUGCUUCUCCCUGCACAAGUACGACC |
| | | UGAUCGCCUUCCAGAAGGACGAGAAGUCCAAGGUGGAGUUCGCCUACUACAUCAACUGCGACUCCUCCAACGGCCGGUUCUACCUGGCCUG |
| | | GCACGACAAGGGCUCCAAGGAGCAGCAGUUCCGGAUCUCCACCCAGAACCUGGUGCUGAUCCAGAAGUACCAGGUGAACGAGCUGGGCAAG |
| | | GAGAUCCGGCCCUGCCGGCUGAAGAAGCGGCCCCCCGUGCGGUCCGGAAAGCGGACCGCCGACGGCUCCGGAGGAGGAAGCCCGAAGAAGA |
| | | AGAGAAAGGUCUAG |
| 77 | Cas9- | MDKKYSIGLDIGTNSVGWAVITDEYKVPSKKFKVLGNTDRHSIKKNLIGALLFDSGETAEATRLKRTARRRYTRRKNRICYLQEIFSNEMA |
| | Cas9 | KVDDSFFHRLEESFLVEEDKKHERHPIFGNIVDEVAYHEKYPTIYHLRKKLVDSTDKADLRLIYLALAHMIKFRGHFLIEGDLNPDNSDVD |
| | fusion- | KLFIQLVQTYNQLFEENPINASGVDAKAILSARLSKSRRLENLIAQLPGEKKNGLFGNLIALSLGLTPNFKSNFDLAEDAKLQLSKDTYDD |
| | 21 | DLDNLLAQIGDQYADLFLAAKNLSDAILLSDILRVNTEITKAPLSASMIKRYDEHHQDLTLLKALVRQQLPEKYKEIFFDQSKNGYAGYID |
| | amino | GGASQEEFYKFIKPILEKMDGTEELLVKLNREDLLRKQRTFDNGSIPHQIHLGELHAILRRQEDFYPFLKDNREKIEKILTFRIPYYVGPL |
| | acid | ARGNSRFAWMTRKSEETITPWNFEEVVDKGASAQSFIERMTNFDKNLPNEKVLPKHSLLYEYFTVYNELTKVKYVTEGMRKPAFLSGEQKK |
| | residual | AIVDLLFKTNRKVTVKQLKEDYFKKIECFDSVEISGVEDRFNASLGTYHDLLKIIKDKDFLDNEENEDILEDIVLTLTLFEDREMIEERLK |
| | linker | TYAHLFDDKVMKQLKRRRYTGWGRLSRKLINGIRDKQSGKTILDFLKSDGFANRNFMQLIHDDSLTFKEDIQKAQVSGQGDSLHEHIANLA |
| | (mRNA | GSPAIKKGILQTVKVVDELVKVMGRHKPENIVIEMARENQTTQKGQKNSRERMKRIEEGIKELGSQILKEHPVENTQLQNEKLYLYYLQNG |
| | T)- | RDMYVDQELDINRLSDYDVDHIVPQSFLKDDSIDNKVLTRSDKNRGKSDNVPSEEVVKKMKNYWRQLLNAKLITQRKFDNLTKAERGGLSE |
| | amino | LDKAGFIKRQLVETRQITKHVAQILDSRMNTKYDENDKLIREVKVITLKSKLVSDFRKDFQFYKVREINNYHHAHDAYLNAVVGTALIKKY |
| | acid | PKLESEFVYGDYKVYDVRKMIAKSEQEIGKATAKYFFYSNIMNFFKTEITLANGEIRKRPLIETNGETGEIVWDKGRDFATVRKVLSMPQV |
| | sequence | NIVKKTEVQTGGFSKESILPKRNSDKLIARKKDWDPKKYGGFDSPTVAYSVLVVAKVEKGKSKKLKSVKELLGITIMERSSFEKNPIDFLE |
| | | AKGYKEVKKDLIIKLPKYSLFELENGRKRMLASAGELQKGNELALPSKYVNFLYLASHYEKLKGSPEDNEQKQLFVEQHKHYLDEIIEQIS |
| | | EFSKRVILADANLDKVLSAYNKHRDKPIREQAENIIHLFTLTNLGAPAAFKYFDTTIDKKRYTSTKEVLDATLIHQSITGLYETRIDLSQL |
| | | GGDGAPESATESGGTSTESEGSSSGAAFKPNPINYILGLDIGIASVGWAMVEIDEEENPIRLIDLGVRVFERAEVPKTGDSLAMARRLARS |
| | | VRRLTRRRAHRLLRARRLLKREGVLQAADFDENGLIKSLPNTPWQLRAAALDRKLTPLEWSAVLLHLIKHRGYLSQRKNEGETADKELGAL |
| | | LKGVANNAHALQTGDFRTPAELALNKFEKESGHIRNQRGDYSHTFSRKDLQAELILLFEKQKEFGNPHVSGGLKEGIETLLMTQRPALSGD |
| | | AVQKMLGHCTFEPAEPKAAKNTYTAERFIWLTKLNNLRILEQGSERPLTDTERATLMDEPYRKSKLTYAQARKLLGLEDTAFFKGLRYGKD |
| | | NAEASTLMEMKAYHAISRALEKEGLKDKKSPLNLSSELQDEIGTAFSLFKTDEDITGRLKDRVQPEILEALLKHISFDKFVQISLKALRRI |
| | | VPLMEQGKRYDEACAEIYGDHYGKKNTEEKIYLPPIPADEIRNPVVLRALSQARKVINGVVRRYGSPARIHIETAREVGKSFKDRKEIEKR |
| | | QEENRKDREKAAAKFREYFPNFVGEPKSKDILKLRLYEQQHGKCLYSGKEINLVRLNEKGYVEIDHALPFSRTWDDSFNNKVLVLGSENQN |
| | | KGNQTPYEYFNGKDNSREWQEFKARVETSRFPRSKKQRILLQKFDEDGFKECNLNDTRYVNRFLCQFVADHILLTGKGKRRVFASNGQITN |
| | | LLRGFWGLRKVRAENDRHHALDAVVVACSTVAMQQKITRFVRYKEMNAFDGKTIDKETGKVLHQKTHFPQPWEFFAQEVMIRVFGKPDGKP |
| | | EFEEADTPEKLRTLLAEKLSSRPEAVHEYVTPLFVSRAPNRKMSGAHKDTLRSAKRFVKHNEKISVKRVWLTEIKLADLENMVNYKNGREI |
| | | ELYEALKARLEAYGGNAKQAFDPKDNPFYKKGGQLVKAVRVEKTQESGVLLNKKNAYTIADNGDMVRVDVFCKVDKKGKNQYFIVPIYAWQ |
| | | VAENILPDIDCKGYRIDDSYTFCFSLHKYDLIAFQKDEKSKVEFAYYINCDSSNGRFYLAWHDKGSKEQQFRISTQNLVLIQKYQVNELGK |
| | | EIRPCRLKKRPPVRSGKRTADGSGGGSPKKKRKV* |
| 78 | Cas9- | GGGAAGCUCAGAAUAAACGCUCAACUUUGGCCGGAUCUGCCACCAUGGACAAGAAGUACUCCAUCGGCCUGGACAUCGGCACCAACUCCGU |
| | Cas9 | GGGCUGGGCCGUGAUCACCGACGAGUACAAGGUGCCCUCCAAGAAGUUCAAGGUGCUGGGCAACACCGACCGGCACUCCAUCAAGAAGAAC |
| | fusion- | CUGAUCGGCGCCCUGCUGUUCGACUCCGGCGAGACCGCCGAGGCCACCCGGCUGAAGCGGACCGCCCGGCGGCGGUACACCCGGCGGAAGA |
| | 11 | ACCGGAUCUGCUACCUGCAGGAGAUCUUCUCCAACGAGAUGGCCAAGGUGGACGACUCCUUCUUCCACCGGCUGGAGGAGUCCUUCCUGGU |
| | amino | GGAGGAGGACAAGAAGCACGAGCGGCACCCCAUCUUCGGCAACAUCGUGGACGAGGUGGCCUACCACGAGAAGUACCCCACCAUCUACCAC |
| | acid | CUGCGGAAGAAGCUGGUGGACUCCACCGACAAGGCCGACCUGCGGCUGAUCUACCUGGCCCUGGCCCACAUGAUCAAGUUCCGGGGCCACU |
| | residue | UCCUGAUCGAGGGCGACCUGAACCCCGACAACUCCGACGUGGACAAGCUGUUCAUCCAGCUGGUGCAGACCUACAACCAGCUGUUCGAGGA |
| | linker | GAACCCCAUCAACGCCUCCGGCGUGGACGCCAAGGCCAUCCUGUCCGCCCGGCUGUCCAAGUCCCGGCGGCUGGAGAACCUGAUCGCCCAG |
| | and | CUGCCCGGCGAGAAGAAGAACGGCCUGUUCGGCAACCUGAUCGCCCUGUCCCUGGGCCUGACCCCCAACUUCAAGUCCAACUUCGACCUGG |
| | HiBit | CCGAGGACGCCAAGCUGCAGCUGUCCAAGGACACCUACGACGACGACCUGGACAACCUGCUGGCCCAGAUCGGCGACCAGUACGCCGACCU |
| | tag | GUUCCUGGCCGCCAAGAACCUGUCCGACGCCAUCCUGCUGUCCGACAUCCUGCGGGUGAACACCGAGAUCACCAAGGCCCCCCUGUCCGCC |
| | (mRNA | UCCAUGAUCAAGCGGUACGACGAGCACCACCAGGACCUGACCCUGCUGAAGGCCCUGGUGCGGCAGCAGCUGCCCGAGAAGUACAAGGAGA |
| | U)- | UCUUCUUCGACCAGUCCAAGAACGGCUACGCCGGCUACAUCGACGGCGGCGCCUCCCAGGAGGAGUUCUACAAGUUCAUCAAGCCCAUCCU |
| | mRNA | GGAGAAGAUGGACGGCACCGAGGAGCUGCUGGUGAAGCUGAACCGGGAGGACCUGCUGCGGAAGCAGCGGACCUUCGACAACGGCUCCAUC |
| | sequence | CCCCACCAGAUCCACCUGGGCGAGCUGCACGCCAUCCUGCGGCGGCAGGAGGACUUCUACCCCUUCCUGAAGGACAACCGGGAGAAGAUCG |
| | | AGAAGAUCCUGACCUUCCGGAUCCCCUACUACGUGGGCCCCCUGGCCCGGGGCAACUCCCGGUUCGCCUGGAUGACCCGGAAGUCCGAGGA |
| | | GACCAUCACCCCCUGGAACUUCGAGGAGGUGGUGGACAAGGGCGCCUCCGCCCAGUCCUUCAUCGAGCGGAUGACCAACUUCGACAAGAAC |
| | | CUGCCCAACGAGAAGGUGCUGCCCAAGCACUCCCUGCUGUACGAGUACUUCACCGUGUACAACGAGCUGACCAAGGUGAAGUACGUGACCG |
| | | AGGGCAUGCGGAAGCCCGCCUUCCUGUCCGGCGAGCAGAAGAAGGCCAUCGUGGACCUGCUGUUCAAGACCAACCGGAAGGUGACCGUGAA |
| | | GCAGCUGAAGGAGGACUACUUCAAGAAGAUCGAGUGCUUCGACUCCGUGGAGAUCUCCGGCGUGGAGGACCGGUUCAACGCCUCCCUGGGC |
| | | ACCUACCACGACCUGCUGAAGAUCAUCAAGGACAAGGACUUCCUGGACAACGAGGAGAACGAGGACAUCCUGGAGGACAUCGUGCUGACCC |
| | | UGACCCUGUUCGAGGACCGGGAGAUGAUCGAGGAGCGGCUGAAGACCUACGCCCACCUGUUCGACGACAAGGUGAUGAAGCAGCUGAAGCG |
| | | GCGGCGGUACACCGGCUGGGGCCGGCUGUCCCGGAAGCUGAUCAACGGCAUCCGGGACAAGCAGUCCGGCAAGACCAUCCUGGACUUCCUG |
| | | AAGUCCGACGGCUUCGCCAACCGGAACUUCAUGCAGCUGAUCCACGACGACUCCCUGACCUUCAAGGAGGACAUCCAGAAGGCCCAGGUGU |
| | | CCGGCCAGGGCGACUCCCUGCACGAGCACAUCGCCAACCUGGCCGGCUCCCCCGCCAUCAAGAAGGGCAUCCUGCAGACCGUGAAGGUGGU |
| | | GGACGAGCUGGUGAAGGUGAUGGGCCGGCACAAGCCCGAGAACAUCGUGAUCGAGAUGGCCCGGGAGAACCAGACCACCCAGAAGGGCCAG |
| | | AAGAACUCCCGGGAGCGGAUGAAGCGGAUCGAGGAGGGCAUCAAGGAGCUGGGCUCCCAGAUCCUGAAGGAGCACCCCGUGGAGAACACCC |
| | | AGCUGCAGAACGAGAAGCUGUACCUGUACUACCUGCAGAACGGCCGGGACAUGUACGUGGACCAGGAGCUGGACAUCAACCGGCUGUCCGA |
| | | CUACGACGUGGACCACAUCGUGCCCCAGUCCUUCCUGAAGGACGACUCCAUCGACAACAAGGUGCUGACCCGGUCCGACAAGAACCGGGGC |
| | | AAGUCCGACAACGUGCCCUCCGAGGAGGUGGUGAAGAAGAUGAAGAACUACUGGCGGCAGCUGCUGAACGCCAAGCUGAUCACCCAGCGGA |
| | | AGUUCGACAACCUGACCAAGGCCGAGCGGGGCGGCCUGUCCGAGCUGGACAAGGCCGGCUUCAUCAAGCGGCAGCUGGUGGAGACCCGGCA |
| | | GAUCACCAAGCACGUGGCCCAGAUCCUGGACUCCCGGAUGAACACCAAGUACGACGAGAACGACAAGCUGAUCCGGGAGGUGAAGGUGAUC |
| | | ACCCUGAAGUCCAAGCUGGUGUCCGACUUCCGGAAGGACUUCCAGUUCUACAAGGUGCGGGAGAUCAACAACUACCACCACGCCCACGACG |
| | | CCUACCUGAACGCCGUGGUGGGCACCGCCCUGAUCAAGAAGUACCCCAAGCUGGAGUCCGAGUUCGUGUACGGCGACUACAAGGUGUACGA |
| | | CGUGCGGAAGAUGAUCGCCAAGUCCGAGCAGGAGAUCGGCAAGGCCACCGCCAAGUACUUCUUCUACUCCAACAUCAUGAACUUCUUCAAG |
| | | ACCGAGAUCACCCUGGCCAACGGCGAGAUCCGGAAGCGGCCCCUGAUCGAGACCAACGGCGAGACCGGCGAGAUCGUGUGGGACAAGGGCC |
| | | GGGACUUCGCCACCGUGCGGAAGGUGCUGUCCAUGCCCCAGGUGAACAUCGUGAAGAAGACCGAGGUGCAGACCGGCGGCUUCUCCAAGGA |
| | | GUCCAUCCUGCCCAAGCGGAACUCCGACAAGCUGAUCGCCCGGAAGAAGGACUGGGACCCCAAGAAGUACGGCGGCUUCGACUCCCCCACC |
| | | GUGGCCUACUCCGUGCUGGUGGUGGCCAAGGUGGAGAAGGGCAAGUCCAAGAAGCUGAAGUCCGUGAAGGAGCUGCUGGGCAUCACCAUCA |
| | | UGGAGCGGUCCUCCUUCGAGAAGAACCCCAUCGACUUCCUGGAGGCCAAGGGCUACAAGGAGGUGAAGAAGGACCUGAUCAUCAAGCUGCC |
| | | CAAGUACUCCCUGUUCGAGCUGGAGAACGGCCGGAAGCGGAUGCUGGCCUCCGCCGGCGAGCUGCAGAAGGGCAACGAGCUGGCCCUGCCC |
| | | UCCAAGUACGUGAACUUCCUGUACCUGGCCUCCCACUACGAGAAGCUGAAGGGCUCCCCCGAGGACAACGAGCAGAAGCAGCUGUUCGUGG |
| | | AGCAGCACAAGCACUACCUGGACGAGAUCAUCGAGCAGAUCUCCGAGUUCUCCAAGCGGGUGAUCCUGGCCGACGCCAACCUGGACAAGGU |
| | | GCUGUCCGCCUACAACAAGCACCGGGACAAGCCCAUCCGGGAGCAGGCCGAGAACAUCAUCCACCUGUUCACCCUGACCAACCUGGGCGCC |
| | | CCCGCCGCCUUCAAGUACUUCGACACCACCAUCGACAAGAAGCGGUACACCUCCACCAAGGAGGUGCUGGACGCCACCCUGAUCCACCAGU |
| | | CCAUCACCGGCCUGUACGAGACCCGGAUCGACCUGUCCCAGCUGGGGGGCGACGGCGCCCCCGAGUCCGCCACCGGCUCCUCCUCCGGUGC |
| | | CGCCUUCAAGCCCAACCCCAUCAACUACAUCCUGGGCCUGGACAUCGGCAUCGCCUCCGUGGGCUGGGCCAUGGUGGAGAUCGACGAGGAG |
| | | GAGAACCCCAUCCGGCUGAUCGACCUGGGCGUGCGGGUGUUCGAGCGGGCCGAGGUGCCCAAGACCGGCGACUCCCUGGCCAUGGCCCGGC |
| | | GGCUGGCCCGGUCCGUGCGGCGGCUGACCCGGCGGCGGGCCCACCGGCUGCUGCGGGCCCGGCGGCUGCUGAAGCGGGAGGGCGUGCUGCA |
| | | GGCCGCCGACUUCGACGAGAACGGCCUGAUCAAGUCCCUGCCCAACACCCCCUGGCAGCUGCGGGCCGCCGCCCUGGACCGGAAGCUGACC |
| | | CCCCUGGAGUGGUCCGCCGUGCUGCUGCACCUGAUCAAGCACCGGGGCUACCUGUCCCAGCGGAAGAACGAGGGCGAGACCGCCGACAAGG |
| | | AGCUGGGCGCCCUGCUGAAGGGCGUGGCCAACAACGCCCACGCCCUGCAGACCGGCGACUUCCGGACCCCCGCCGAGCUGGCCCUGAACAA |
| | | GUUCGAGAAGGAGUCCGGCCACAUCCGGAACCAGCGGGGCGACUACUCCCACACCUUCUCCCGGAAGGACCUGCAGGCCGAGCUGAUCCUG |
| | | CUGUUCGAGAAGCAGAAGGAGUUCGGCAACCCCCACGUGUCCGGCGGCCUGAAGGAGGGCAUCGAGACCCUGCUGAUGACCCAGCGGCCCG |
| | | CCCUGUCCGGCGACGCCGUGCAGAAGAUGCUGGGCCACUGCACCUUCGAGCCCGCCGAGCCCAAGGCCGCCAAGAACACCUACACCGCCGA |
| | | GCGGUUCAUCUGGCUGACCAAGCUGAACAACCUGCGGAUCCUGGAGCAGGGCUCCGAGCGGCCCCUGACCGACACCGAGCGGGCCACCCUG |
| | | AUGGACGAGCCCUACCGGAAGUCCAAGCUGACCUACGCCCAGGCCCGGAAGCUGCUGGGCCUGGAGGACACCGCCUUCUUCAAGGGCCUGC |
| | | GGUACGGCAAGGACAACGCCGAGGCCUCCACCCUGAUGGAGAUGAAGGCCUACCACGCCAUCUCCCGGGCCCUGGAGAAGGAGGGCCUGAA |
| | | GGACAAGAAGUCCCCCCUGAACCUGUCCUCCGAGCUGCAGGACGAGAUCGGCACCGCCUUCUCCCUGUUCAAGACCGACGAGGACAUCACC |
| | | GGCCGGCUGAAGGACCGGGUGCAGCCCGAGAUCCUGGAGGCCCUGCUGAAGCACAUCUCCUUCGACAAGUUCGUGCAGAUCUCCCUGAAGG |
| | | CCCUGCGGCGGAUCGUGCCCCUGAUGGAGCAGGGCAAGCGGUACGACGAGGCCUGCGCCGAGAUCUACGGCGACCACUACGGCAAGAAGAA |
| | | CACCGAGGAGAAGAUCUACCUGCCCCCCAUCCCCGCCGACGAGAUCCGGAACCCCGUGGUGCUGCGGGCCCUGUCCCAGGCCCGGAAGGUG |
| | | AUCAACGGCGUGGUGCGGCGGUACGGCUCCCCCGCCCGGAUCCACAUCGAGACCGCCCGGGAGGUGGGCAAGUCCUUCAAGGACCGGAAGG |
| | | AGAUCGAGAAGCGGCAGGAGGAGAACCGGAAGGACCGGGAGAAGGCCGCCGCCAAGUUCCGGGAGUACUUCCCCAACUUCGUGGGCGAGCC |
| | | CAAGUCCAAGGACAUCCUGAAGCUGCGGCUGUACGAGCAGCAGCACGGCAAGUGCCUGUACUCCGGCAAGGAGAUCAACCUGGUGCGGCUG |
| | | AACGAGAAGGGCUACGUGGAGAUCGACCACGCCCUGCCCUUCUCCCGGACCUGGGACGACUCCUUCAACAACAAGGUGCUGGUGCUGGGCU |
| | | CCGAGAACCAGAACAAGGGCAACCAGACCCCCUACGAGUACUUCAACGGCAAGGACAACUCCCGGGAGUGGCAGGAGUUCAAGGCCCGGGU |
| | | GGAGACCUCCCGGUUCCCCCGGUCCAAGAAGCAGCGGAUCCUGCUGCAGAAGUUCGACGAGGACGGCUUCAAGGAGUGCAACCUGAACGAC |
| | | ACCCGGUACGUGAACCGCUUCCUGUGCCAGUUCGUGGCCGACCACAUCCUGCUGACCGGCAAGGGCAAGCGGCGGGUGUUCGCCUCCAACG |
| | | GCCAGAUCACCAACCUGCUGCGGGGCUUCUGGGGCCUGCGGAAGGUGCGGGCCGAGAACGACCGGCACCACGCCCUGGACGCCGUGGUGGU |
| | | GGCCUGCUCCACCGUGGCCAUGCAGCAGAAGAUCACCCGGUUCGUGCGGUACAAGGAGAUGAACGCCUUCGACGGCAAGACCAUCGACAAG |
| | | GAGACCGGCAAGGUGCUGCACCAGAAGACCCACUUCCCCCAGCCCUGGGAGUUCUUCGCCCAGGAGGUGAUGAUCCGGGUGUUCGGCAAGC |
| | | CCGACGGCAAGCCCGAGUUCGAGGAGGCCGACACCCCCGAGAAGCUGCGGACCCUGCUGGCCGAGAAGCUGUCCUCCCGGCCCGAGGCCGU |
| | | GCACGAGUACGUGACCCCCCUGUUCGUGUCCCGGGCCCCCAACCGGAAGAUGUCCGGCGCCCACAAGGACACCCUGCGGUCCGCCAAGCGG |
| | | UUCGUGAAGCACAACGAGAAGAUCUCCGUGAAGCGGGUGUGGCUGACCGAGAUCAAGCUGGCCGACCUGGAGAACAUGGUGAACUACAAGA |
| | | ACGGCCGGGAGAUCGAGCUGUACGAGGCCCUGAAGGCCCGGCUGGAGGCCUACGGCGGCAACGCCAAGCAGGCCUUCGACCCCAAGGACAA |
| | | CCCCUUCUACAAGAAGGGCGGCCAGCUGGUGAAGGCCGUGCGGGUGGAGAAGACCCAGGAGUCCGGCGUGCUGCUGAACAAGAAGAACGCC |
| | | UACACCAUCGCCGACAACGGCGACAUGGUGCGGGUGGACGUGUUCUGCAAGGUGGACAAGAAGGGCAAGAACCAGUACUUCAUCGUGCCCA |
| | | UCUACGCCUGGCAGGUGGCCGAGAACAUCCUGCCCGACAUCGACUGCAAGGGCUACCGGAUCGACGACUCCUACACCUUCUGCUUCUCCCU |
| | | GCACAAGUACGACCUGAUCGCCUUCCAGAAGGACGAGAAGUCCAAGGUGGAGUUCGCCUACUACAUCAACUGCGACUCCUCCAACGGCCGG |
| | | UUCUACCUGGCCUGGCACGACAAGGGCUCCAAGGAGCAGCAGUUCCGGAUCUCCACCCAGAACCUGGUGCUGAUCCAGAAGUACCAGGUGA |
| | | ACGAGCUGGGCAAGGAGAUCCGGCCCUGCCGGCUGAAGAAGCGGCCCCCCGUGCGGUCCGGAAAGCGGACCGCCGACGGCUCCGGAGGAGG |
| | | AAGCCCGAAGAAGAAGAGAAAGGUCAGCGAAAGCGCAACACCGGAAAGCGUCAGCGGAUGGAGACUGUUCAAGAAGAUCAGCUAGCUAGCA |
| | | CCAGCCUCAAGAACACCCGAAUGGAGUCUCUAAGCUACAUAAUACCAACUUACACUUUACAAAAUGUUGUCCCCCAAAAUGUAGCCAUUCG |
| | | UAUCUGCUCCUAAUAAAAAGAAAGUUUCUUCACAUUCUCUCGAGAAAAAAAAAAAAUGGAAAAAAAAAAAACGGAAAAAAAAAAAAGGUAA |
| | | AAAAAAAAAAUAUAAAAAAAAAAAACAUAAAAAAAAAAAACGAAAAAAAAAAAACGUAAAAAAAAAAAACUCAAAAAAAAAAAAGAUAAAA |
| | | AAAAAAAACCUAAAAAAAAAAAAUGUAAAAAAAAAAAAGGGAAAAAAAAAAAACGCAAAAAAAAAAAACACAAAAAAAAAAAAUGCAAAAA |
| | | AAAAAAAUCGAAAAAAAAAAAAUCUAAAAAAAAAAAACGAAAAAAAAAAAACCCAAAAAAAAAAAAGACAAAAAAAAAAAAUAGAAAAAAA |
| | | AAAAAGUUAAAAAAAAAAAACUGAAAAAAAAAAAAUUUAAAAAAAAAAAAUCUAG |
| 79 | Cas9- | AUGGACAAGAAGUACUCCAUCGGCCUGGACAUCGGCACCAACUCCGUGGGCUGGGCCGUGAUCACCGACGAGUACAAGGUGCCCUCCAAGA |
| | Cas9 | AGUUCAAGGUGCUGGGCAACACCGACCGGCACUCCAUCAAGAAGAACCUGAUCGGCGCCCUGCUGUUCGACUCCGGCGAGACCGCCGAGGC |
| | fusion- | CACCCGGCUGAAGCGGACCGCCCGGCGGCGGUACACCCGGCGGAAGAACCGGAUCUGCUACCUGCAGGAGAUCUUCUCCAACGAGAUGGCC |
| | 11 | AAGGUGGACGACUCCUUCUUCCACCGGCUGGAGGAGUCCUUCCUGGUGGAGGAGGACAAGAAGCACGAGCGGCACCCCAUCUUCGGCAACA |
| | amino | UCGUGGACGAGGUGGCCUACCACGAGAAGUACCCCACCAUCUACCACCUGCGGAAGAAGCUGGUGGACUCCACCGACAAGGCCGACCUGCG |
| | acid | GCUGAUCUACCUGGCCCUGGCCCACAUGAUCAAGUUCCGGGGCCACUUCCUGAUCGAGGGCGACCUGAACCCCGACAACUCCGACGUGGAC |
| | residue | AAGCUGUUCAUCCAGCUGGUGCAGACCUACAACCAGCUGUUCGAGGAGAACCCCAUCAACGCCUCCGGCGUGGACGCCAAGGCCAUCCUGU |
| | linker | CCGCCCGGCUGUCCAAGUCCCGGCGGCUGGAGAACCUGAUCGCCCAGCUGCCCGGCGAGAAGAAGAACGGCCUGUUCGGCAACCUGAUCGC |
| | and | CCUGUCCCUGGGCCUGACCCCCAACUUCAAGUCCAACUUCGACCUGGCCGAGGACGCCAAGCUGCAGCUGUCCAAGGACACCUACGACGAC |
| | HiBit | GACCUGGACAACCUGCUGGCCCAGAUCGGCGACCAGUACGCCGACCUGUUCCUGGCCGCCAAGAACCUGUCCGACGCCAUCCUGCUGUCCG |
| | tag | ACAUCCUGCGGGUGAACACCGAGAUCACCAAGGCCCCCCUGUCCGCCUCCAUGAUCAAGCGGUACGACGAGCACCACCAGGACCUGACCCU |
| | (mRNA | GCUGAAGGCCCUGGUGCGGCAGCAGCUGCCCGAGAAGUACAAGGAGAUCUUCUUCGACCAGUCCAAGAACGGCUACGCCGGCUACAUCGAC |
| | U)-ORF | GGCGGCGCCUCCCAGGAGGAGUUCUACAAGUUCAUCAAGCCCAUCCUGGAGAAGAUGGACGGCACCGAGGAGCUGCUGGUGAAGCUGAACC |
| | sequence | GGGAGGACCUGCUGCGGAAGCAGCGGACCUUCGACAACGGCUCCAUCCCCCACCAGAUCCACCUGGGCGAGCUGCACGCCAUCCUGCGGCG |
| | | GCAGGAGGACUUCUACCCCUUCCUGAAGGACAACCGGGAGAAGAUCGAGAAGAUCCUGACCUUCCGGAUCCCCUACUACGUGGGCCCCCUG |
| | | GCCCGGGGCAACUCCCGGUUCGCCUGGAUGACCCGGAAGUCCGAGGAGACCAUCACCCCCUGGAACUUCGAGGAGGUGGUGGACAAGGGCG |
| | | CCUCCGCCCAGUCCUUCAUCGAGCGGAUGACCAACUUCGACAAGAACCUGCCCAACGAGAAGGUGCUGCCCAAGCACUCCCUGCUGUACGA |
| | | GUACUUCACCGUGUACAACGAGCUGACCAAGGUGAAGUACGUGACCGAGGGCAUGCGGAAGCCCGCCUUCCUGUCCGGCGAGCAGAAGAAG |
| | | GCCAUCGUGGACCUGCUGUUCAAGACCAACCGGAAGGUGACCGUGAAGCAGCUGAAGGAGGACUACUUCAAGAAGAUCGAGUGCUUCGACU |
| | | CCGUGGAGAUCUCCGGCGUGGAGGACCGGUUCAACGCCUCCCUGGGCACCUACCACGACCUGCUGAAGAUCAUCAAGGACAAGGACUUCCU |
| | | GGACAACGAGGAGAACGAGGACAUCCUGGAGGACAUCGUGCUGACCCUGACCCUGUUCGAGGACCGGGAGAUGAUCGAGGAGCGGCUGAAG |
| | | ACCUACGCCCACCUGUUCGACGACAAGGUGAUGAAGCAGCUGAAGCGGCGGCGGUACACCGGCUGGGGCCGGCUGUCCCGGAAGCUGAUCA |
| | | ACGGCAUCCGGGACAAGCAGUCCGGCAAGACCAUCCUGGACUUCCUGAAGUCCGACGGCUUCGCCAACCGGAACUUCAUGCAGCUGAUCCA |
| | | CGACGACUCCCUGACCUUCAAGGAGGACAUCCAGAAGGCCCAGGUGUCCGGCCAGGGCGACUCCCUGCACGAGCACAUCGCCAACCUGGCC |
| | | GGCUCCCCCGCCAUCAAGAAGGGCAUCCUGCAGACCGUGAAGGUGGUGGACGAGCUGGUGAAGGUGAUGGGCCGGCACAAGCCCGAGAACA |
| | | UCGUGAUCGAGAUGGCCCGGGAGAACCAGACCACCCAGAAGGGCCAGAAGAACUCCCGGGAGCGGAUGAAGCGGAUCGAGGAGGGCAUCAA |
| | | GGAGCUGGGCUCCCAGAUCCUGAAGGAGCACCCCGUGGAGAACACCCAGCUGCAGAACGAGAAGCUGUACCUGUACUACCUGCAGAACGGC |
| | | CGGGACAUGUACGUGGACCAGGAGCUGGACAUCAACCGGCUGUCCGACUACGACGUGGACCACAUCGUGCCCCAGUCCUUCCUGAAGGACG |
| | | ACUCCAUCGACAACAAGGUGCUGACCCGGUCCGACAAGAACCGGGGCAAGUCCGACAACGUGCCCUCCGAGGAGGUGGUGAAGAAGAUGAA |
| | | GAACUACUGGCGGCAGCUGCUGAACGCCAAGCUGAUCACCCAGCGGAAGUUCGACAACCUGACCAAGGCCGAGCGGGGGGCCUGUCCGAG |
| | | CUGGACAAGGCCGGCUUCAUCAAGCGGCAGCUGGUGGAGACCCGGCAGAUCACCAAGCACGUGGCCCAGAUCCUGGACUCCCGGAUGAACA |
| | | CCAAGUACGACGAGAACGACAAGCUGAUCCGGGAGGUGAAGGUGAUCACCCUGAAGUCCAAGCUGGUGUCCGACUUCCGGAAGGACUUCCA |
| | | GUUCUACAAGGUGCGGGAGAUCAACAACUACCACCACGCCCACGACGCCUACCUGAACGCCGUGGUGGGCACCGCCCUGAUCAAGAAGUAC |
| | | CCCAAGCUGGAGUCCGAGUUCGUGUACGGCGACUACAAGGUGUACGACGUGCGGAAGAUGAUCGCCAAGUCCGAGCAGGAGAUCGGCAAGG |
| | | CCACCGCCAAGUACUUCUUCUACUCCAACAUCAUGAACUUCUUCAAGACCGAGAUCACCCUGGCCAACGGCGAGAUCCGGAAGCGGCCCCU |
| | | GAUCGAGACCAACGGCGAGACCGGCGAGAUCGUGUGGGACAAGGGCCGGGACUUCGCCACCGUGCGGAAGGUGCUGUCCAUGCCCCAGGUG |
| | | AACAUCGUGAAGAAGACCGAGGUGCAGACCGGCGGCUUCUCCAAGGAGUCCAUCCUGCCCAAGCGGAACUCCGACAAGCUGAUCGCCCGGA |
| | | AGAAGGACUGGGACCCCAAGAAGUACGGCGGCUUCGACUCCCCCACCGUGGCCUACUCCGUGCUGGUGGUGGCCAAGGUGGAGAAGGGCAA |
| | | GUCCAAGAAGCUGAAGUCCGUGAAGGAGCUGCUGGGCAUCACCAUCAUGGAGCGGUCCUCCUUCGAGAAGAACCCCAUCGACUUCCUGGAG |
| | | GCCAAGGGCUACAAGGAGGUGAAGAAGGACCUGAUCAUCAAGCUGCCCAAGUACUCCCUGUUCGAGCUGGAGAACGGCCGGAAGCGGAUGC |
| | | UGGCCUCCGCCGGCGAGCUGCAGAAGGGCAACGAGCUGGCCCUGCCCUCCAAGUACGUGAACUUCCUGUACCUGGCCUCCCACUACGAGAA |
| | | GCUGAAGGGCUCCCCCGAGGACAACGAGCAGAAGCAGCUGUUCGUGGAGCAGCACAAGCACUACCUGGACGAGAUCAUCGAGCAGAUCUCC |
| | | GAGUUCUCCAAGCGGGUGAUCCUGGCCGACGCCAACCUGGACAAGGUGCUGUCCGCCUACAACAAGCACCGGGACAAGCCCAUCCGGGAGC |
| | | AGGCCGAGAACAUCAUCCACCUGUUCACCCUGACCAACCUGGGCGCCCCCGCCGCCUUCAAGUACUUCGACACCACCAUCGACAAGAAGCG |
| | | GUACACCUCCACCAAGGAGGUGCUGGACGCCACCCUGAUCCACCAGUCCAUCACCGGCCUGUACGAGACCCGGAUCGACCUGUCCCAGCUG |
| | | GGCGGCGACGGCGCCCCCGAGUCCGCCACCGGCUCCUCCUCCGGUGCCGCCUUCAAGCCCAACCCCAUCAACUACAUCCUGGGCCUGGACA |
| | | UCGGCAUCGCCUCCGUGGGCUGGGCCAUGGUGGAGAUCGACGAGGAGGAGAACCCCAUCCGGCUGAUCGACCUGGGCGUGCGGGUGUUCGA |
| | | GCGGGCCGAGGUGCCCAAGACCGGCGACUCCCUGGCCAUGGCCCGGCGGCUGGCCCGGUCCGUGCGGCGGCUGACCCGGCGGCGGGCCCAC |
| | | CGGCUGCUGCGGGCCCGGCGGCUGCUGAAGCGGGAGGGCGUGCUGCAGGCCGCCGACUUCGACGAGAACGGCCUGAUCAAGUCCCUGCCCA |
| | | ACACCCCCUGGCAGCUGCGGGCCGCCGCCCUGGACCGGAAGCUGACCCCCCUGGAGUGGUCCGCCGUGCUGCUGCACCUGAUCAAGCACCG |
| | | GGGCUACCUGUCCCAGCGGAAGAACGAGGGCGAGACCGCCGACAAGGAGCUGGGCGCCCUGCUGAAGGGCGUGGCCAACAACGCCCACGCC |
| | | CUGCAGACCGGCGACUUCCGGACCCCCGCCGAGCUGGCCCUGAACAAGUUCGAGAAGGAGUCCGGCCACAUCCGGAACCAGCGGGGCGACU |
| | | ACUCCCACACCUUCUCCCGGAAGGACCUGCAGGCCGAGCUGAUCCUGCUGUUCGAGAAGCAGAAGGAGUUCGGCAACCCCCACGUGUCCGG |
| | | CGGCCUGAAGGAGGGCAUCGAGACCCUGCUGAUGACCCAGCGGCCCGCCCUGUCCGGCGACGCCGUGCAGAAGAUGCUGGGCCACUGCACC |
| | | UUCGAGCCCGCCGAGCCCAAGGCCGCCAAGAACACCUACACCGCCGAGCGGUUCAUCUGGCUGACCAAGCUGAACAACCUGCGGAUCCUGG |
| | | AGCAGGGCUCCGAGCGGCCCCUGACCGACACCGAGCGGGCCACCCUGAUGGACGAGCCCUACCGGAAGUCCAAGCUGACCUACGCCCAGGC |
| | | CCGGAAGCUGCUGGGCCUGGAGGACACCGCCUUCUUCAAGGGCCUGCGGUACGGCAAGGACAACGCCGAGGCCUCCACCCUGAUGGAGAUG |
| | | AAGGCCUACCACGCCAUCUCCCGGGCCCUGGAGAAGGAGGGCCUGAAGGACAAGAAGUCCCCCCUGAACCUGUCCUCCGAGCUGCAGGACG |
| | | AGAUCGGCACCGCCUUCUCCCUGUUCAAGACCGACGAGGACAUCACCGGCCGGCUGAAGGACCGGGUGCAGCCCGAGAUCCUGGAGGCCCU |
| | | GCUGAAGCACAUCUCCUUCGACAAGUUCGUGCAGAUCUCCCUGAAGGCCCUGCGGCGGAUCGUGCCCCUGAUGGAGCAGGGCAAGCGGUAC |
| | | GACGAGGCCUGCGCCGAGAUCUACGGCGACCACUACGGCAAGAAGAACACCGAGGAGAAGAUCUACCUGCCCCCCAUCCCCGCCGACGAGA |
| | | UCCGGAACCCCGUGGUGCUGCGGGCCCUGUCCCAGGCCCGGAAGGUGAUCAACGGCGUGGUGCGGCGGUACGGCUCCCCCGCCCGGAUCCA |
| | | CAUCGAGACCGCCCGGGAGGUGGGCAAGUCCUUCAAGGACCGGAAGGAGAUCGAGAAGCGGCAGGAGGAGAACCGGAAGGACCGGGAGAAG |
| | | GCCGCCGCCAAGUUCCGGGAGUACUUCCCCAACUUCGUGGGCGAGCCCAAGUCCAAGGACAUCCUGAAGCUGCGGCUGUACGAGCAGCAGC |
| | | ACGGCAAGUGCCUGUACUCCGGCAAGGAGAUCAACCUGGUGCGGCUGAACGAGAAGGGCUACGUGGAGAUCGACCACGCCCUGCCCUUCUC |
| | | CCGGACCUGGGACGACUCCUUCAACAACAAGGUGCUGGUGCUGGGCUCCGAGAACCAGAACAAGGGCAACCAGACCCCCUACGAGUACUUC |
| | | AACGGCAAGGACAACUCCCGGGAGUGGCAGGAGUUCAAGGCCCGGGUGGAGACCUCCCGGUUCCCCCGGUCCAAGAAGCAGCGGAUCCUGC |
| | | UGCAGAAGUUCGACGAGGACGGCUUCAAGGAGUGCAACCUGAACGACACCCGGUACGUGAACCGCUUCCUGUGCCAGUUCGUGGCCGACCA |
| | | CAUCCUGCUGACCGGCAAGGGCAAGCGGCGGGUGUUCGCCUCCAACGGCCAGAUCACCAACCUGCUGCGGGGCUUCUGGGGCCUGCGGAAG |
| | | GUGCGGGCCGAGAACGACCGGCACCACGCCCUGGACGCCGUGGUGGUGGCCUGCUCCACCGUGGCCAUGCAGCAGAAGAUCACCCGGUUCG |
| | | UGCGGUACAAGGAGAUGAACGCCUUCGACGGCAAGACCAUCGACAAGGAGACCGGCAAGGUGCUGCACCAGAAGACCCACUUCCCCCAGCC |
| | | CUGGGAGUUCUUCGCCCAGGAGGUGAUGAUCCGGGUGUUCGGCAAGCCCGACGGCAAGCCCGAGUUCGAGGAGGCCGACACCCCCGAGAAG |
| | | CUGCGGACCCUGCUGGCCGAGAAGCUGUCCUCCCGGCCCGAGGCCGUGCACGAGUACGUGACCCCCCUGUUCGUGUCCCGGGCCCCCAACC |
| | | GGAAGAUGUCCGGCGCCCACAAGGACACCCUGCGGUCCGCCAAGCGGUUCGUGAAGCACAACGAGAAGAUCUCCGUGAAGCGGGUGUGGCU |
| | | GACCGAGAUCAAGCUGGCCGACCUGGAGAACAUGGUGAACUACAAGAACGGCCGGGAGAUCGAGCUGUACGAGGCCCUGAAGGCCCGGCUG |
| | | GAGGCCUACGGCGGCAACGCCAAGCAGGCCUUCGACCCCAAGGACAACCCCUUCUACAAGAAGGGCGGCCAGCUGGUGAAGGCCGUGCGGG |
| | | UGGAGAAGACCCAGGAGUCCGGCGUGCUGCUGAACAAGAAGAACGCCUACACCAUCGCCGACAACGGCGACAUGGUGCGGGUGGACGUGUU |
| | | CUGCAAGGUGGACAAGAAGGGCAAGAACCAGUACUUCAUCGUGCCCAUCUACGCCUGGCAGGUGGCCGAGAACAUCCUGCCCGACAUCGAC |
| | | UGCAAGGGCUACCGGAUCGACGACUCCUACACCUUCUGCUUCUCCCUGCACAAGUACGACCUGAUCGCCUUCCAGAAGGACGAGAAGUCCA |
| | | AGGUGGAGUUCGCCUACUACAUCAACUGCGACUCCUCCAACGGCCGGUUCUACCUGGCCUGGCACGACAAGGGCUCCAAGGAGCAGCAGUU |
| | | CCGGAUCUCCACCCAGAACCUGGUGCUGAUCCAGAAGUACCAGGUGAACGAGCUGGGCAAGGAGAUCCGGCCCUGCCGGCUGAAGAAGCGG |
| | | CCCCCCGUGCGGUCCGGAAAGCGGACCGCCGACGGCUCCGGAGGAGGAAGCCCGAAGAAGAAGAGAAAGGUCAGCGAAAGCGCAACACCGG |
| | | AAAGCGUCAGCGGAUGGAGACUGUUCAAGAAGAUCAGCUAG |
| 80 | Cas9- | MDKKYSIGLDIGTNSVGWAVITDEYKVPSKKFKVLGNTDRHSIKKNLIGALLFDSGETAEATRLKRTARRRYTRRKNRICYLQEIFSNEMA |
| | Cas9 | KVDDSFFHRLEESFLVEEDKKHERHPIFGNIVDEVAYHEKYPTIYHLRKKLVDSTDKADLRLIYLALAHMIKFRGHFLIEGDLNPDNSDVD |
| | fusion- | KLFIQLVQTYNQLFEENPINASGVDAKAILSARLSKSRRLENLIAQLPGEKKNGLFGNLIALSLGLTPNFKSNFDLAEDAKLQLSKDTYDD |
| | 11 | DLDNLLAQIGDQYADLFLAAKNLSDAILLSDILRVNTEITKAPLSASMIKRYDEHHQDLTLLKALVRQQLPEKYKEIFFDQSKNGYAGYID |
| | amino | GGASQEEFYKFIKPILEKMDGTEELLVKLNREDLLRKQRTFDNGSIPHQIHLGELHAILRRQEDFYPFLKDNREKIEKILTFRIPYYVGPL |
| | acid | ARGNSRFAWMTRKSEETITPWNFEEVVDKGASAQSFIERMTNFDKNLPNEKVLPKHSLLYEYFTVYNELTKVKYVTEGMRKPAFLSGEQKK |
| | residue | AIVDLLFKTNRKVTVKQLKEDYFKKIECFDSVEISGVEDRFNASLGTYHDLLKIIKDKDFLDNEENEDILEDIVLTLTLFEDREMIEERLK |
| | linker | TYAHLFDDKVMKQLKRRRYTGWGRLSRKLINGIRDKQSGKTILDFLKSDGFANRNFMQLIHDDSLTFKEDIQKAQVSGQGDSLHEHIANLA |
| | and | GSPAIKKGILQTVKVVDELVKVMGRHKPENIVIEMARENQTTQKGQKNSRERMKRIEEGIKELGSQILKEHPVENTQLQNEKLYLYYLQNG |
| | HiBit | RDMYVDQELDINRLSDYDVDHIVPQSFLKDDSIDNKVLTRSDKNRGKSDNVPSEEVVKKMKNYWRQLLNAKLITQRKFDNLTKAERGGLSE |
| | tag | LDKAGFIKRQLVETRQITKHVAQILDSRMNTKYDENDKLIREVKVITLKSKLVSDFRKDFQFYKVREINNYHHAHDAYLNAVVGTALIKKY |
| | (mRNA | PKLESEFVYGDYKVYDVRKMIAKSEQEIGKATAKYFFYSNIMNFFKTEITLANGEIRKRPLIETNGETGEIVWDKGRDFATVRKVLSMPQV |
| | U)- | NIVKKTEVQTGGFSKESILPKRNSDKLIARKKDWDPKKYGGFDSPTVAYSVLVVAKVEKGKSKKLKSVKELLGITIMERSSFEKNPIDFLE |
| | amino | AKGYKEVKKDLIIKLPKYSLFELENGRKRMLASAGELQKGNELALPSKYVNFLYLASHYEKLKGSPEDNEQKQLFVEQHKHYLDEIIEQIS |
| | acid | EFSKRVILADANLDKVLSAYNKHRDKPIREQAENIIHLFTLTNLGAPAAFKYFDTTIDKKRYTSTKEVLDATLIHQSITGLYETRIDLSQL |
| | sequence | GGDGAPESATGSSSGAAFKPNPINYILGLDIGIASVGWAMVEIDEEENPIRLIDLGVRVFERAEVPKTGDSLAMARRLARSVRRLTRRRAH |
| | | RLLRARRLLKREGVLQAADFDENGLIKSLPNTPWQLRAAALDRKLTPLEWSAVLLHLIKHRGYLSQRKNEGETADKELGALLKGVANNAHA |
| | | LQTGDFRTPAELALNKFEKESGHIRNQRGDYSHTFSRKDLQAELILLFEKQKEFGNPHVSGGLKEGIETLLMTQRPALSGDAVQKMLGHCT |
| | | FEPAEPKAAKNTYTAERFIWLTKLNNLRILEQGSERPLTDTERATLMDEPYRKSKLTYAQARKLLGLEDTAFFKGLRYGKDNAEASTLMEM |
| | | KAYHAISRALEKEGLKDKKSPLNLSSELQDEIGTAFSLFKTDEDITGRLKDRVQPEILEALLKHISFDKFVQISLKALRRIVPLMEQGKRY |
| | | DEACAEIYGDHYGKKNTEEKIYLPPIPADEIRNPVVLRALSQARKVINGVVRRYGSPARIHIETAREVGKSFKDRKEIEKRQEENRKDREK |
| | | AAAKFREYFPNFVGEPKSKDILKLRLYEQQHGKCLYSGKEINLVRLNEKGYVEIDHALPFSRTWDDSFNNKVLVLGSENQNKGNQTPYEYF |
| | | NGKDNSREWQEFKARVETSRFPRSKKQRILLQKFDEDGFKECNLNDTRYVNRFLCQFVADHILLTGKGKRRVFASNGQITNLLRGFWGLRK |
| | | VRAENDRHHALDAVVVACSTVAMQQKITRFVRYKEMNAFDGKTIDKETGKVLHQKTHFPQPWEFFAQEVMIRVFGKPDGKPEFEEADTPEK |
| | | LRTLLAEKLSSRPEAVHEYVTPLFVSRAPNRKMSGAHKDTLRSAKRFVKHNEKISVKRVWLTEIKLADLENMVNYKNGREIELYEALKARL |
| | | EAYGGNAKQAFDPKDNPFYKKGGQLVKAVRVEKTQESGVLLNKKNAYTIADNGDMVRVDVFCKVDKKGKNQYFIVPIYAWQVAENILPDID |
| | | CKGYRIDDSYTFCFSLHKYDLIAFQKDEKSKVEFAYYINCDSSNGRFYLAWHDKGSKEQQFRISTQNLVLIQKYQVNELGKEIRPCRLKKR |
| | | PPVRSGKRTADGSGGGSPKKKRKVSESATPESVSGWRLFKKIS* |
| 81 | Cas9- | AUGGACAAGAAGUACUCCAUCGGCCUGGACAUCGGCACCAACUCCGUGGGCUGGGCCGUGAUCACCGACGAGUACAAGGUGCCCUCCAAGA |
| | Cas9 | AGUUCAAGGUGCUGGGCAACACCGACCGGCACUCCAUCAAGAAGAACCUGAUCGGCGCCCUGCUGUUCGACUCCGGCGAGACCGCCGAGGC |
| | fusion- | CACCCGGCUGAAGCGGACCGCCCGGCGGCGGUACACCCGGCGGAAGAACCGGAUCUGCUACCUGCAGGAGAUCUUCUCCAACGAGAUGGCC |
| | 11 | AAGGUGGACGACUCCUUCUUCCACCGGCUGGAGGAGUCCUUCCUGGUGGAGGAGGACAAGAAGCACGAGCGGCACCCCAUCUUCGGCAACA |
| | amino | UCGUGGACGAGGUGGCCUACCACGAGAAGUACCCCACCAUCUACCACCUGCGGAAGAAGCUGGUGGACUCCACCGACAAGGCCGACCUGCG |
| | acid | GCUGAUCUACCUGGCCCUGGCCCACAUGAUCAAGUUCCGGGGCCACUUCCUGAUCGAGGGCGACCUGAACCCCGACAACUCCGACGUGGAC |
| | residual | AAGCUGUUCAUCCAGCUGGUGCAGACCUACAACCAGCUGUUCGAGGAGAACCCCAUCAACGCCUCCGGCGUGGACGCCAAGGCCAUCCUGU |
| | linker | CCGCCCGGCUGUCCAAGUCCCGGCGGCUGGAGAACCUGAUCGCCCAGCUGCCCGGCGAGAAGAAGAACGGCCUGUUCGGCAACCUGAUCGC |
| | (mRNA | CCUGUCCCUGGGCCUGACCCCCAACUUCAAGUCCAACUUCGACCUGGCCGAGGACGCCAAGCUGCAGCUGUCCAAGGACACCUACGACGAC |
| | U)- | GACCUGGACAACCUGCUGGCCCAGAUCGGCGACCAGUACGCCGACCUGUUCCUGGCCGCCAAGAACCUGUCCGACGCCAUCCUGCUGUCCG |
| | mRNA | ACAUCCUGCGGGUGAACACCGAGAUCACCAAGGCCCCCCUGUCCGCCUCCAUGAUCAAGCGGUACGACGAGCACCACCAGGACCUGACCCU |
| | sequence | GCUGAAGGCCCUGGUGCGGCAGCAGCUGCCCGAGAAGUACAAGGAGAUCUUCUUCGACCAGUCCAAGAACGGCUACGCCGGCUACAUCGAC |
| | | GGCGGCGCCUCCCAGGAGGAGUUCUACAAGUUCAUCAAGCCCAUCCUGGAGAAGAUGGACGGCACCGAGGAGCUGCUGGUGAAGCUGAACC |
| | | GGGAGGACCUGCUGCGGAAGCAGCGGACCUUCGACAACGGCUCCAUCCCCCACCAGAUCCACCUGGGCGAGCUGCACGCCAUCCUGCGGCG |
| | | GCAGGAGGACUUCUACCCCUUCCUGAAGGACAACCGGGAGAAGAUCGAGAAGAUCCUGACCUUCCGGAUCCCCUACUACGUGGGCCCCCUG |
| | | GCCCGGGGCAACUCCCGGUUCGCCUGGAUGACCCGGAAGUCCGAGGAGACCAUCACCCCCUGGAACUUCGAGGAGGUGGUGGACAAGGGCG |
| | | CCUCCGCCCAGUCCUUCAUCGAGCGGAUGACCAACUUCGACAAGAACCUGCCCAACGAGAAGGUGCUGCCCAAGCACUCCCUGCUGUACGA |
| | | GUACUUCACCGUGUACAACGAGCUGACCAAGGUGAAGUACGUGACCGAGGGCAUGCGGAAGCCCGCCUUCCUGUCCGGCGAGCAGAAGAAG |
| | | GCCAUCGUGGACCUGCUGUUCAAGACCAACCGGAAGGUGACCGUGAAGCAGCUGAAGGAGGACUACUUCAAGAAGAUCGAGUGCUUCGACU |
| | | CCGUGGAGAUCUCCGGCGUGGAGGACCGGUUCAACGCCUCCCUGGGCACCUACCACGACCUGCUGAAGAUCAUCAAGGACAAGGACUUCCU |
| | | GGACAACGAGGAGAACGAGGACAUCCUGGAGGACAUCGUGCUGACCCUGACCCUGUUCGAGGACCGGGAGAUGAUCGAGGAGCGGCUGAAG |
| | | ACCUACGCCCACCUGUUCGACGACAAGGUGAUGAAGCAGCUGAAGCGGCGGCGGUACACCGGCUGGGGCCGGCUGUCCCGGAAGCUGAUCA |
| | | ACGGCAUCCGGGACAAGCAGUCCGGCAAGACCAUCCUGGACUUCCUGAAGUCCGACGGCUUCGCCAACCGGAACUUCAUGCAGCUGAUCCA |
| | | CGACGACUCCCUGACCUUCAAGGAGGACAUCCAGAAGGCCCAGGUGUCCGGCCAGGGCGACUCCCUGCACGAGCACAUCGCCAACCUGGCC |
| | | GGCUCCCCCGCCAUCAAGAAGGGCAUCCUGCAGACCGUGAAGGUGGUGGACGAGCUGGUGAAGGUGAUGGGCCGGCACAAGCCCGAGAACA |
| | | UCGUGAUCGAGAUGGCCCGGGAGAACCAGACCACCCAGAAGGGCCAGAAGAACUCCCGGGAGCGGAUGAAGCGGAUCGAGGAGGGCAUCAA |
| | | GGAGCUGGGCUCCCAGAUCCUGAAGGAGCACCCCGUGGAGAACACCCAGCUGCAGAACGAGAAGCUGUACCUGUACUACCUGCAGAACGGC |
| | | CGGGACAUGUACGUGGACCAGGAGCUGGACAUCAACCGGCUGUCCGACUACGACGUGGACCACAUCGUGCCCCAGUCCUUCCUGAAGGACG |
| | | ACUCCAUCGACAACAAGGUGCUGACCCGGUCCGACAAGAACCGGGGCAAGUCCGACAACGUGCCCUCCGAGGAGGUGGUGAAGAAGAUGAA |
| | | GAACUACUGGCGGCAGCUGCUGAACGCCAAGCUGAUCACCCAGCGGAAGUUCGACAACCUGACCAAGGCCGAGCGGGGCGGCCUGUCCGAG |
| | | CUGGACAAGGCCGGCUUCAUCAAGCGGCAGCUGGUGGAGACCCGGCAGAUCACCAAGCACGUGGCCCAGAUCCUGGACUCCCGGAUGAACA |
| | | CCAAGUACGACGAGAACGACAAGCUGAUCCGGGAGGUGAAGGUGAUCACCCUGAAGUCCAAGCUGGUGUCCGACUUCCGGAAGGACUUCCA |
| | | GUUCUACAAGGUGCGGGAGAUCAACAACUACCACCACGCCCACGACGCCUACCUGAACGCCGUGGUGGGCACCGCCCUGAUCAAGAAGUAC |
| | | CCCAAGCUGGAGUCCGAGUUCGUGUACGGCGACUACAAGGUGUACGACGUGCGGAAGAUGAUCGCCAAGUCCGAGCAGGAGAUCGGCAAGG |
| | | CCACCGCCAAGUACUUCUUCUACUCCAACAUCAUGAACUUCUUCAAGACCGAGAUCACCCUGGCCAACGGCGAGAUCCGGAAGCGGCCCCU |
| | | GAUCGAGACCAACGGCGAGACCGGCGAGAUCGUGUGGGACAAGGGCCGGGACUUCGCCACCGUGCGGAAGGUGCUGUCCAUGCCCCAGGUG |
| | | AACAUCGUGAAGAAGACCGAGGUGCAGACCGGCGGCUUCUCCAAGGAGUCCAUCCUGCCCAAGCGGAACUCCGACAAGCUGAUCGCCCGGA |
| | | AGAAGGACUGGGACCCCAAGAAGUACGGCGGCUUCGACUCCCCCACCGUGGCCUACUCCGUGCUGGUGGUGGCCAAGGUGGAGAAGGGCAA |
| | | GUCCAAGAAGCUGAAGUCCGUGAAGGAGCUGCUGGGCAUCACCAUCAUGGAGCGGUCCUCCUUCGAGAAGAACCCCAUCGACUUCCUGGAG |
| | | GCCAAGGGCUACAAGGAGGUGAAGAAGGACCUGAUCAUCAAGCUGCCCAAGUACUCCCUGUUCGAGCUGGAGAACGGCCGGAAGCGGAUGC |
| | | UGGCCUCCGCCGGCGAGCUGCAGAAGGGCAACGAGCUGGCCCUGCCCUCCAAGUACGUGAACUUCCUGUACCUGGCCUCCCACUACGAGAA |
| | | GCUGAAGGGCUCCCCCGAGGACAACGAGCAGAAGCAGCUGUUCGUGGAGCAGCACAAGCACUACCUGGACGAGAUCAUCGAGCAGAUCUCC |
| | | GAGUUCUCCAAGCGGGUGAUCCUGGCCGACGCCAACCUGGACAAGGUGCUGUCCGCCUACAACAAGCACCGGGACAAGCCCAUCCGGGAGC |
| | | AGGCCGAGAACAUCAUCCACCUGUUCACCCUGACCAACCUGGGCGCCCCCGCCGCCUUCAAGUACUUCGACACCACCAUCGACAAGAAGCG |
| | | GUACACCUCCACCAAGGAGGUGCUGGACGCCACCCUGAUCCACCAGUCCAUCACCGGCCUGUACGAGACCCGGAUCGACCUGUCCCAGCUG |
| | | GGCGGCGACGGCGCCCCCGAGUCCGCCACCGGCUCCUCCUCCGGUGCCGCCUUCAAGCCCAACCCCAUCAACUACAUCCUGGGCCUGGACA |
| | | UCGGCAUCGCCUCCGUGGGCUGGGCCAUGGUGGAGAUCGACGAGGAGGAGAACCCCAUCCGGCUGAUCGACCUGGGCGUGCGGGUGUUCGA |
| | | GCGGGCCGAGGUGCCCAAGACCGGCGACUCCCUGGCCAUGGCCCGGCGGCUGGCCCGGUCCGUGCGGCGGCUGACCCGGCGGCGGGCCCAC |
| | | CGGCUGCUGCGGGCCCGGCGGCUGCUGAAGCGGGAGGGCGUGCUGCAGGCCGCCGACUUCGACGAGAACGGCCUGAUCAAGUCCCUGCCCA |
| | | ACACCCCCUGGCAGCUGCGGGCCGCCGCCCUGGACCGGAAGCUGACCCCCCUGGAGUGGUCCGCCGUGCUGCUGCACCUGAUCAAGCACCG |
| | | GGGCUACCUGUCCCAGCGGAAGAACGAGGGCGAGACCGCCGACAAGGAGCUGGGCGCCCUGCUGAAGGGCGUGGCCAACAACGCCCACGCC |
| | | CUGCAGACCGGCGACUUCCGGACCCCCGCCGAGCUGGCCCUGAACAAGUUCGAGAAGGAGUCCGGCCACAUCCGGAACCAGCGGGGCGACU |
| | | ACUCCCACACCUUCUCCCGGAAGGACCUGCAGGCCGAGCUGAUCCUGCUGUUCGAGAAGCAGAAGGAGUUCGGCAACCCCCACGUGUCCGG |
| | | CGGCCUGAAGGAGGGCAUCGAGACCCUGCUGAUGACCCAGCGGCCCGCCCUGUCCGGCGACGCCGUGCAGAAGAUGCUGGGCCACUGCACC |
| | | UUCGAGCCCGCCGAGCCCAAGGCCGCCAAGAACACCUACACCGCCGAGCGGUUCAUCUGGCUGACCAAGCUGAACAACCUGCGGAUCCUGG |
| | | AGCAGGGCUCCGAGCGGCCCCUGACCGACACCGAGCGGGCCACCCUGAUGGACGAGCCCUACCGGAAGUCCAAGCUGACCUACGCCCAGGC |
| | | CCGGAAGCUGCUGGGCCUGGAGGACACCGCCUUCUUCAAGGGCCUGCGGUACGGCAAGGACAACGCCGAGGCCUCCACCCUGAUGGAGAUG |
| | | AAGGCCUACCACGCCAUCUCCCGGGCCCUGGAGAAGGAGGGCCUGAAGGACAAGAAGUCCCCCCUGAACCUGUCCUCCGAGCUGCAGGACG |
| | | AGAUCGGCACCGCCUUCUCCCUGUUCAAGACCGACGAGGACAUCACCGGCCGGCUGAAGGACCGGGUGCAGCCCGAGAUCCUGGAGGCCCU |
| | | GCUGAAGCACAUCUCCUUCGACAAGUUCGUGCAGAUCUCCCUGAAGGCCCUGCGGCGGAUCGUGCCCCUGAUGGAGCAGGGCAAGCGGUAC |
| | | GACGAGGCCUGCGCCGAGAUCUACGGCGACCACUACGGCAAGAAGAACACCGAGGAGAAGAUCUACCUGCCCCCCAUCCCCGCCGACGAGA |
| | | UCCGGAACCCCGUGGUGCUGCGGGCCCUGUCCCAGGCCCGGAAGGUGAUCAACGGCGUGGUGCGGCGGUACGGCUCCCCCGCCCGGAUCCA |
| | | CAUCGAGACCGCCCGGGAGGUGGGCAAGUCCUUCAAGGACCGGAAGGAGAUCGAGAAGCGGCAGGAGGAGAACCGGAAGGACCGGGAGAAG |
| | | GCCGCCGCCAAGUUCCGGGAGUACUUCCCCAACUUCGUGGGCGAGCCCAAGUCCAAGGACAUCCUGAAGCUGCGGCUGUACGAGCAGCAGC |
| | | ACGGCAAGUGCCUGUACUCCGGCAAGGAGAUCAACCUGGUGCGGCUGAACGAGAAGGGCUACGUGGAGAUCGACCACGCCCUGCCCUUCUC |
| | | CCGGACCUGGGACGACUCCUUCAACAACAAGGUGCUGGUGCUGGGCUCCGAGAACCAGAACAAGGGCAACCAGACCCCCUACGAGUACUUC |
| | | AACGGCAAGGACAACUCCCGGGAGUGGCAGGAGUUCAAGGCCCGGGUGGAGACCUCCCGGUUCCCCCGGUCCAAGAAGCAGCGGAUCCUGC |
| | | UGCAGAAGUUCGACGAGGACGGCUUCAAGGAGUGCAACCUGAACGACACCCGGUACGUGAACCGCUUCCUGUGCCAGUUCGUGGCCGACCA |
| | | CAUCCUGCUGACCGGCAAGGGCAAGCGGCGGGUGUUCGCCUCCAACGGCCAGAUCACCAACCUGCUGCGGGGCUUCUGGGGCCUGCGGAAG |
| | | GUGCGGGCCGAGAACGACCGGCACCACGCCCUGGACGCCGUGGUGGUGGCCUGCUCCACCGUGGCCAUGCAGCAGAAGAUCACCCGGUUCG |
| | | UGCGGUACAAGGAGAUGAACGCCUUCGACGGCAAGACCAUCGACAAGGAGACCGGCAAGGUGCUGCACCAGAAGACCCACUUCCCCCAGCC |
| | | CUGGGAGUUCUUCGCCCAGGAGGUGAUGAUCCGGGUGUUCGGCAAGCCCGACGGCAAGCCCGAGUUCGAGGAGGCCGACACCCCCGAGAAG |
| | | CUGCGGACCCUGCUGGCCGAGAAGCUGUCCUCCCGGCCCGAGGCCGUGCACGAGUACGUGACCCCCCUGUUCGUGUCCCGGGCCCCCAACC |
| | | GGAAGAUGUCCGGCGCCCACAAGGACACCCUGCGGUCCGCCAAGCGGUUCGUGAAGCACAACGAGAAGAUCUCCGUGAAGCGGGUGUGGCU |
| | | GACCGAGAUCAAGCUGGCCGACCUGGAGAACAUGGUGAACUACAAGAACGGCCGGGAGAUCGAGCUGUACGAGGCCCUGAAGGCCCGGCUG |
| | | GAGGCCUACGGCGGCAACGCCAAGCAGGCCUUCGACCCCAAGGACAACCCCUUCUACAAGAAGGGCGGCCAGCUGGUGAAGGCCGUGCGGG |
| | | UGGAGAAGACCCAGGAGUCCGGCGUGCUGCUGAACAAGAAGAACGCCUACACCAUCGCCGACAACGGCGACAUGGUGCGGGUGGACGUGUU |
| | | CUGCAAGGUGGACAAGAAGGGCAAGAACCAGUACUUCAUCGUGCCCAUCUACGCCUGGCAGGUGGCCGAGAACAUCCUGCCCGACAUCGAC |
| | | UGCAAGGGCUACCGGAUCGACGACUCCUACACCUUCUGCUUCUCCCUGCACAAGUACGACCUGAUCGCCUUCCAGAAGGACGAGAAGUCCA |
| | | AGGUGGAGUUCGCCUACUACAUCAACUGCGACUCCUCCAACGGCCGGUUCUACCUGGCCUGGCACGACAAGGGCUCCAAGGAGCAGCAGUU |
| | | CCGGAUCUCCACCCAGAACCUGGUGCUGAUCCAGAAGUACCAGGUGAACGAGCUGGGCAAGGAGAUCCGGCCCUGCCGGCUGAAGAAGCGG |
| | | CCCCCCGUGCGGUCCGGAAAGCGGACCGCCGACGGCUCCGGAGGAGGAAGCCCGAAGAAGAAGAGAAAGGUCUAG |
| 82 | Cas9- | MDKKYSIGLDIGTNSVGWAVITDEYKVPSKKFKVLGNTDRHSIKKNLIGALLFDSGETAEATRLKRTARRRYTRRKNRICYLQEIFSNEMA |
| | Cas9- | KVDDSFFHRLEESFLVEEDKKHERHPIFGNIVDEVAYHEKYPTIYHLRKKLVDSTDKADLRLIYLALAHMIKFRGHFLIEGDLNPDNSDVD |
| | 11 | KLFIQLVQTYNQLFEENPINASGVDAKAILSARLSKSRRLENLIAQLPGEKKNGLFGNLIALSLGLTPNFKSNFDLAEDAKLQLSKDTYDD |
| | fusion | DLDNLLAQIGDQYADLFLAAKNLSDAILLSDILRVNTEITKAPLSASMIKRYDEHHQDLTLLKALVRQQLPEKYKEIFFDQSKNGYAGYID |
| | amino | GGASQEEFYKFIKPILEKMDGTEELLVKLNREDLLRKQRTFDNGSIPHQIHLGELHAILRRQEDFYPFLKDNREKIEKILTFRIPYYVGPL |
| | acid | ARGNSRFAWMTRKSEETITPWNFEEVVDKGASAQSFIERMTNFDKNLPNEKVLPKHSLLYEYFTVYNELTKVKYVTEGMRKPAFLSGEQKK |
| | residual | AIVDLLFKTNRKVTVKQLKEDYFKKIECFDSVEISGVEDRFNASLGTYHDLLKIIKDKDFLDNEENEDILEDIVLTLTLFEDREMIEERLK |
| | linker | TYAHLFDDKVMKQLKRRRYTGWGRLSRKLINGIRDKQSGKTILDFLKSDGFANRNFMQLIHDDSLTFKEDIQKAQVSGQGDSLHEHIANLA |
| | (mRNA | GSPAIKKGILQTVKVVDELVKVMGRHKPENIVIEMARENQTTQKGQKNSRERMKRIEEGIKELGSQILKEHPVENTQLQNEKLYLYYLQNG |
| | U)- | RDMYVDQELDINRLSDYDVDHIVPQSFLKDDSIDNKVLTRSDKNRGKSDNVPSEEVVKKMKNYWRQLLNAKLITQRKFDNLTKAERGGLSE |
| | amino | LDKAGFIKRQLVETRQITKHVAQILDSRMNTKYDENDKLIREVKVITLKSKLVSDFRKDFQFYKVREINNYHHAHDAYLNAVVGTALIKKY |
| | acid | PKLESEFVYGDYKVYDVRKMIAKSEQEIGKATAKYFFYSNIMNFFKTEITLANGEIRKRPLIETNGETGEIVWDKGRDFATVRKVLSMPQV |
| | sequence | NIVKKTEVQTGGFSKESILPKRNSDKLIARKKDWDPKKYGGFDSPTVAYSVLVVAKVEKGKSKKLKSVKELLGITIMERSSFEKNPIDFLE |
| | | AKGYKEVKKDLIIKLPKYSLFELENGRKRMLASAGELQKGNELALPSKYVNFLYLASHYEKLKGSPEDNEQKQLFVEQHKHYLDEIIEQIS |
| | | EFSKRVILADANLDKVLSAYNKHRDKPIREQAENIIHLFTLTNLGAPAAFKYFDTTIDKKRYTSTKEVLDATLIHQSITGLYETRIDLSQL |
| | | GGDGAPESATGSSSGAAFKPNPINYILGLDIGIASVGWAMVEIDEEENPIRLIDLGVRVFERAEVPKTGDSLAMARRLARSVRRLTRRRAH |
| | | RLLRARRLLKREGVLQAADFDENGLIKSLPNTPWQLRAAALDRKLTPLEWSAVLLHLIKHRGYLSQRKNEGETADKELGALLKGVANNAHA |
| | | LQTGDFRTPAELALNKFEKESGHIRNQRGDYSHTFSRKDLQAELILLFEKQKEFGNPHVSGGLKEGIETLLMTQRPALSGDAVQKMLGHCT |
| | | FEPAEPKAAKNTYTAERFIWLTKLNNLRILEQGSERPLTDTERATLMDEPYRKSKLTYAQARKLLGLEDTAFFKGLRYGKDNAEASTLMEM |
| | | KAYHAISRALEKEGLKDKKSPLNLSSELQDEIGTAFSLFKTDEDITGRLKDRVQPEILEALLKHISFDKFVQISLKALRRIVPLMEQGKRY |
| | | DEACAEIYGDHYGKKNTEEKIYLPPIPADEIRNPVVLRALSQARKVINGVVRRYGSPARIHIETAREVGKSFKDRKEIEKRQEENRKDREK |
| | | AAAKFREYFPNFVGEPKSKDILKLRLYEQQHGKCLYSGKEINLVRLNEKGYVEIDHALPFSRTWDDSFNNKVLVLGSENQNKGNQTPYEYF |
| | | NGKDNSREWQEFKARVETSRFPRSKKQRILLQKFDEDGFKECNLNDTRYVNRFLCQFVADHILLTGKGKRRVFASNGQITNLLRGFWGLRK |
| | | VRAENDRHHALDAVVVACSTVAMQQKITRFVRYKEMNAFDGKTIDKETGKVLHQKTHFPQPWEFFAQEVMIRVFGKPDGKPEFEEADTPEK |
| | | LRTLLAEKLSSRPEAVHEYVTPLFVSRAPNRKMSGAHKDTLRSAKRFVKHNEKISVKRVWLTEIKLADLENMVNYKNGREIELYEALKARL |
| | | EAYGGNAKQAFDPKDNPFYKKGGQLVKAVRVEKTQESGVLLNKKNAYTIADNGDMVRVDVFCKVDKKGKNQYFIVPIYAWQVAENILPDID |
| | | CKGYRIDDSYTFCFSLHKYDLIAFQKDEKSKVEFAYYINCDSSNGRFYLAWHDKGSKEQQFRISTQNLVLIQKYQVNELGKEIRPCRLKKR |
| | | PPVRSGKRTADGSGGGSPKKKRKV* |
| 83 | Cas9- | GGGAAGCUCAGAAUAAACGCUCAACUUUGGCCGGAUCUGCCACCAUGGACAAGAAGUACUCCAUCGGCCUGGACAUCGGCACCAACUCCGU |
| | Cas9 | GGGCUGGGCCGUGAUCACCGACGAGUACAAGGUGCCCUCCAAGAAGUUCAAGGUGCUGGGCAACACCGACCGGCACUCCAUCAAGAAGAAC |
| | fusion- | CUGAUCGGCGCCCUGCUGUUCGACUCCGGCGAGACCGCCGAGGCCACCCGGCUGAAGCGGACCGCCCGGCGGCGGUACACCCGGCGGAAGA |
| | 81 | ACCGGAUCUGCUACCUGCAGGAGAUCUUCUCCAACGAGAUGGCCAAGGUGGACGACUCCUUCUUCCACCGGCUGGAGGAGUCCUUCCUGGU |
| | amino | GGAGGAGGACAAGAAGCACGAGCGGCACCCCAUCUUCGGCAACAUCGUGGACGAGGUGGCCUACCACGAGAAGUACCCCACCAUCUACCAC |
| | acid | CUGCGGAAGAAGCUGGUGGACUCCACCGACAAGGCCGACCUGCGGCUGAUCUACCUGGCCCUGGCCCACAUGAUCAAGUUCCGGGGCCACU |
| | residue | UCCUGAUCGAGGGCGACCUGGGCGGCGGCGGCUCCACCGAGAUCACCAAGGCCCCCCUGUCCGCCUCCAUGAUCAAGCGGUACGACGAGCA |
| | linker | CCACCAGGACCUGACCCUGCUGAAGGCCCUGGUGCGGCAGCAGCUGCCCGAGAAGUACAAGGAGAUCUUCUUCGACCAGUCCAAGAACGGC |
| | and | UACGCCGGCUACAUCGACGGCGGCGCCUCCCAGGAGGAGUUCUACAAGUUCAUCAAGCCCAUCCUGGAGAAGAUGGACGGCACCGAGGAGC |
| | HiBit | UGCUGGUGAAGCUGAACCGGGAGGACCUGCUGCGGAAGCAGCGGACCUUCGACAACGGCUCCAUCCCCCACCAGAUCCACCUGGGCGAGCU |
| | tag- | GCACGCCAUCCUGCGGCGGCAGGAGGACUUCUACCCCUUCCUGAAGGACAACCGGGAGAAGAUCGAGAAGAUCCUGACCUUCCGGAUCCCC |
| | SpyCas9 | UACUACGUGGGCCCCCUGGCCCGGGGCAACUCCCGGUUCGCCUGGAUGACCCGGAAGUCCGAGGAGACCAUCACCCCCUGGAACUUCGAGG |
| | without | AGGUGGUGGACAAGGGCGCCUCCGCCCAGUCCUUCAUCGAGCGGAUGACCAACUUCGACAAGAACCUGCCCAACGAGAAGGUGCUGCCCAA |
| | Rec2 | GCACUCCCUGCUGUACGAGUACUUCACCGUGUACAACGAGCUGACCAAGGUGAAGUACGUGACCGAGGGCAUGCGGAAGCCCGCCUUCCUG |
| | domain | UCCGGCGAGCAGAAGAAGGCCAUCGUGGACCUGCUGUUCAAGACCAACCGGAAGGUGACCGUGAAGCAGCUGAAGGAGGACUACUUCAAGA |
| | (mRNA | AGAUCGAGUGCUUCGACUCCGUGGAGAUCUCCGGCGUGGAGGACCGGUUCAACGCCUCCCUGGGCACCUACCACGACCUGCUGAAGAUCAU |
| | V)- | CAAGGACAAGGACUUCCUGGACAACGAGGAGAACGAGGACAUCCUGGAGGACAUCGUGCUGACCCUGACCCUGUUCGAGGACCGGGAGAUG |
| | mRNA | AUCGAGGAGCGGCUGAAGACCUACGCCCACCUGUUCGACGACAAGGUGAUGAAGCAGCUGAAGCGGCGGCGGUACACCGGCUGGGGCCGGC |
| | sequence | UGUCCCGGAAGCUGAUCAACGGCAUCCGGGACAAGCAGUCCGGCAAGACCAUCCUGGACUUCCUGAAGUCCGACGGCUUCGCCAACCGGAA |
| | | CUUCAUGCAGCUGAUCCACGACGACUCCCUGACCUUCAAGGAGGACAUCCAGAAGGCCCAGGUGUCCGGCCAGGGCGACUCCCUGCACGAG |
| | | CACAUCGCCAACCUGGCCGGCUCCCCCGCCAUCAAGAAGGGCAUCCUGCAGACCGUGAAGGUGGUGGACGAGCUGGUGAAGGUGAUGGGCC |
| | | GGCACAAGCCCGAGAACAUCGUGAUCGAGAUGGCCCGGGAGAACCAGACCACCCAGAAGGGCCAGAAGAACUCCCGGGAGCGGAUGAAGCG |
| | | GAUCGAGGAGGGCAUCAAGGAGCUGGGCUCCCAGAUCCUGAAGGAGCACCCCGUGGAGAACACCCAGCUGCAGAACGAGAAGCUGUACCUG |
| | | UACUACCUGCAGAACGGCCGGGACAUGUACGUGGACCAGGAGCUGGACAUCAACCGGCUGUCCGACUACGACGUGGACCACAUCGUGCCCC |
| | | AGUCCUUCCUGAAGGACGACUCCAUCGACAACAAGGUGCUGACCCGGUCCGACAAGAACCGGGGCAAGUCCGACAACGUGCCCUCCGAGGA |
| | | GGUGGUGAAGAAGAUGAAGAACUACUGGCGGCAGCUGCUGAACGCCAAGCUGAUCACCCAGCGGAAGUUCGACAACCUGACCAAGGCCGAG |
| | | CGGGGCGGCCUGUCCGAGCUGGACAAGGCCGGCUUCAUCAAGCGGCAGCUGGUGGAGACCCGGCAGAUCACCAAGCACGUGGCCCAGAUCC |
| | | UGGACUCCCGGAUGAACACCAAGUACGACGAGAACGACAAGCUGAUCCGGGAGGUGAAGGUGAUCACCCUGAAGUCCAAGCUGGUGUCCGA |
| | | CUUCCGGAAGGACUUCCAGUUCUACAAGGUGCGGGAGAUCAACAACUACCACCACGCCCACGACGCCUACCUGAACGCCGUGGUGGGCACC |
| | | GCCCUGAUCAAGAAGUACCCCAAGCUGGAGUCCGAGUUCGUGUACGGCGACUACAAGGUGUACGACGUGCGGAAGAUGAUCGCCAAGUCCG |
| | | AGCAGGAGAUCGGCAAGGCCACCGCCAAGUACUUCUUCUACUCCAACAUCAUGAACUUCUUCAAGACCGAGAUCACCCUGGCCAACGGCGA |
| | | GAUCCGGAAGCGGCCCCUGAUCGAGACCAACGGCGAGACCGGCGAGAUCGUGUGGGACAAGGGCCGGGACUUCGCCACCGUGCGGAAGGUG |
| | | CUGUCCAUGCCCCAGGUGAACAUCGUGAAGAAGACCGAGGUGCAGACCGGCGGCUUCUCCAAGGAGUCCAUCCUGCCCAAGCGGAACUCCG |
| | | ACAAGCUGAUCGCCCGGAAGAAGGACUGGGACCCCAAGAAGUACGGCGGCUUCGACUCCCCCACCGUGGCCUACUCCGUGCUGGUGGUGGC |
| | | CAAGGUGGAGAAGGGCAAGUCCAAGAAGCUGAAGUCCGUGAAGGAGCUGCUGGGCAUCACCAUCAUGGAGCGGUCCUCCUUCGAGAAGAAC |
| | | CCCAUCGACUUCCUGGAGGCCAAGGGCUACAAGGAGGUGAAGAAGGACCUGAUCAUCAAGCUGCCCAAGUACUCCCUGUUCGAGCUGGAGA |
| | | ACGGCCGGAAGCGGAUGCUGGCCUCCGCCGGCGAGCUGCAGAAGGGCAACGAGCUGGCCCUGCCCUCCAAGUACGUGAACUUCCUGUACCU |
| | | GGCCUCCCACUACGAGAAGCUGAAGGGCUCCCCCGAGGACAACGAGCAGAAGCAGCUGUUCGUGGAGCAGCACAAGCACUACCUGGACGAG |
| | | AUCAUCGAGCAGAUCUCCGAGUUCUCCAAGCGGGUGAUCCUGGCCGACGCCAACCUGGACAAGGUGCUGUCCGCCUACAACAAGCACCGGG |
| | | ACAAGCCCAUCCGGGAGCAGGCCGAGAACAUCAUCCACCUGUUCACCCUGACCAACCUGGGCGCCCCCGCCGCCUUCAAGUACUUCGACAC |
| | | CACCAUCGACAAGAAGCGGUACACCUCCACCAAGGAGGUGCUGGACGCCACCCUGAUCCACCAGUCCAUCACCGGCCUGUACGAGACCCGG |
| | | AUCGACCUGUCCCAGCUGGGCGGCGACGGCGCCCCCGAGUCCGCCACCGAGUCCGGCGGCACCUCCACCGAGUCCGAGGGCUCCGCCGGCA |
| | | CCUCCACCGAGUCCGAGGGCUCCGCCGGCUCCGCCGGCUCCACCUCCACCGAGGAGGGCACCUCCACCGAGUCCGAGGGCUCCGCCGGCAC |
| | | CUCCACCGAGUCCGAGGGCUCCGCCGGCACCUCCGAGUCCGCCACCGAGUCCGGCGGCACCUCCACCGAGUCCGAGGGCUCCUCCUCCGGU |
| | | GCCGCCUUCAAGCCCAACCCCAUCAACUACAUCCUGGGCCUGGACAUCGGCAUCGCCUCCGUGGGCUGGGCCAUGGUGGAGAUCGACGAGG |
| | | AGGAGAACCCCAUCCGGCUGAUCGACCUGGGCGUGCGGGUGUUCGAGCGGGCCGAGGUGCCCAAGACCGGCGACUCCCUGGCCAUGGCCCG |
| | | GCGGCUGGCCCGGUCCGUGCGGCGGCUGACCCGGCGGCGGGCCCACCGGCUGCUGCGGGCCCGGCGGCUGCUGAAGCGGGAGGGCGUGCUG |
| | | CAGGCCGCCGACUUCGACGAGAACGGCCUGAUCAAGUCCCUGCCCAACACCCCCUGGCAGCUGCGGGCCGCCGCCCUGGACCGGAAGCUGA |
| | | CCCCCCUGGAGUGGUCCGCCGUGCUGCUGCACCUGAUCAAGCACCGGGGCUACCUGUCCCAGCGGAAGAACGAGGGCGAGACCGCCGACAA |
| | | GGAGCUGGGCGCCCUGCUGAAGGGCGUGGCCAACAACGCCCACGCCCUGCAGACCGGCGACUUCCGGACCCCCGCCGAGCUGGCCCUGAAC |
| | | AAGUUCGAGAAGGAGUCCGGCCACAUCCGGAACCAGCGGGGCGACUACUCCCACACCUUCUCCCGGAAGGACCUGCAGGCCGAGCUGAUCC |
| | | UGCUGUUCGAGAAGCAGAAGGAGUUCGGCAACCCCCACGUGUCCGGCGGCCUGAAGGAGGGCAUCGAGACCCUGCUGAUGACCCAGCGGCC |
| | | CGCCCUGUCCGGCGACGCCGUGCAGAAGAUGCUGGGCCACUGCACCUUCGAGCCCGCCGAGCCCAAGGCCGCCAAGAACACCUACACCGCC |
| | | GAGCGGUUCAUCUGGCUGACCAAGCUGAACAACCUGCGGAUCCUGGAGCAGGGCUCCGAGCGGCCCCUGACCGACACCGAGCGGGCCACCC |
| | | UGAUGGACGAGCCCUACCGGAAGUCCAAGCUGACCUACGCCCAGGCCCGGAAGCUGCUGGGCCUGGAGGACACCGCCUUCUUCAAGGGCCU |
| | | GCGGUACGGCAAGGACAACGCCGAGGCCUCCACCCUGAUGGAGAUGAAGGCCUACCACGCCAUCUCCCGGGCCCUGGAGAAGGAGGGCCUG |
| | | AAGGACAAGAAGUCCCCCCUGAACCUGUCCUCCGAGCUGCAGGACGAGAUCGGCACCGCCUUCUCCCUGUUCAAGACCGACGAGGACAUCA |
| | | CCGGCCGGCUGAAGGACCGGGUGCAGCCCGAGAUCCUGGAGGCCCUGCUGAAGCACAUCUCCUUCGACAAGUUCGUGCAGAUCUCCCUGAA |
| | | GGCCCUGCGGCGGAUCGUGCCCCUGAUGGAGCAGGGCAAGCGGUACGACGAGGCCUGCGCCGAGAUCUACGGCGACCACUACGGCAAGAAG |
| | | AACACCGAGGAGAAGAUCUACCUGCCCCCCAUCCCCGCCGACGAGAUCCGGAACCCCGUGGUGCUGCGGGCCCUGUCCCAGGCCCGGAAGG |
| | | UGAUCAACGGCGUGGUGCGGCGGUACGGCUCCCCCGCCCGGAUCCACAUCGAGACCGCCCGGGAGGUGGGCAAGUCCUUCAAGGACCGGAA |
| | | GGAGAUCGAGAAGCGGCAGGAGGAGAACCGGAAGGACCGGGAGAAGGCCGCCGCCAAGUUCCGGGAGUACUUCCCCAACUUCGUGGGCGAG |
| | | CCCAAGUCCAAGGACAUCCUGAAGCUGCGGCUGUACGAGCAGCAGCACGGCAAGUGCCUGUACUCCGGCAAGGAGAUCAACCUGGUGCGGC |
| | | UGAACGAGAAGGGCUACGUGGAGAUCGACCACGCCCUGCCCUUCUCCCGGACCUGGGACGACUCCUUCAACAACAAGGUGCUGGUGCUGGG |
| | | CUCCGAGAACCAGAACAAGGGCAACCAGACCCCCUACGAGUACUUCAACGGCAAGGACAACUCCCGGGAGUGGCAGGAGUUCAAGGCCCGG |
| | | GUGGAGACCUCCCGGUUCCCCCGGUCCAAGAAGCAGCGGAUCCUGCUGCAGAAGUUCGACGAGGACGGCUUCAAGGAGUGCAACCUGAACG |
| | | ACACCCGGUACGUGAACCGCUUCCUGUGCCAGUUCGUGGCCGACCACAUCCUGCUGACCGGCAAGGGCAAGCGGCGGGUGUUCGCCUCCAA |
| | | CGGCCAGAUCACCAACCUGCUGCGGGGCUUCUGGGGCCUGCGGAAGGUGCGGGCCGAGAACGACCGGCACCACGCCCUGGACGCCGUGGUG |
| | | GUGGCCUGCUCCACCGUGGCCAUGCAGCAGAAGAUCACCCGGUUCGUGCGGUACAAGGAGAUGAACGCCUUCGACGGCAAGACCAUCGACA |
| | | AGGAGACCGGCAAGGUGCUGCACCAGAAGACCCACUUCCCCCAGCCCUGGGAGUUCUUCGCCCAGGAGGUGAUGAUCCGGGUGUUCGGCAA |
| | | GCCCGACGGCAAGCCCGAGUUCGAGGAGGCCGACACCCCCGAGAAGCUGCGGACCCUGCUGGCCGAGAAGCUGUCCUCCCGGCCCGAGGCC |
| | | GUGCACGAGUACGUGACCCCCCUGUUCGUGUCCCGGGCCCCCAACCGGAAGAUGUCCGGCGCCCACAAGGACACCCUGCGGUCCGCCAAGC |
| | | GGUUCGUGAAGCACAACGAGAAGAUCUCCGUGAAGCGGGUGUGGCUGACCGAGAUCAAGCUGGCCGACCUGGAGAACAUGGUGAACUACAA |
| | | GAACGGCCGGGAGAUCGAGCUGUACGAGGCCCUGAAGGCCCGGCUGGAGGCCUACGGCGGCAACGCCAAGCAGGCCUUCGACCCCAAGGAC |
| | | AACCCCUUCUACAAGAAGGGCGGCCAGCUGGUGAAGGCCGUGCGGGUGGAGAAGACCCAGGAGUCCGGCGUGCUGCUGAACAAGAAGAACG |
| | | CCUACACCAUCGCCGACAACGGCGACAUGGUGCGGGUGGACGUGUUCUGCAAGGUGGACAAGAAGGGCAAGAACCAGUACUUCAUCGUGCC |
| | | CAUCUACGCCUGGCAGGUGGCCGAGAACAUCCUGCCCGACAUCGACUGCAAGGGCUACCGGAUCGACGACUCCUACACCUUCUGCUUCUCC |
| | | CUGCACAAGUACGACCUGAUCGCCUUCCAGAAGGACGAGAAGUCCAAGGUGGAGUUCGCCUACUACAUCAACUGCGACUCCUCCAACGGCC |
| | | GGUUCUACCUGGCCUGGCACGACAAGGGCUCCAAGGAGCAGCAGUUCCGGAUCUCCACCCAGAACCUGGUGCUGAUCCAGAAGUACCAGGU |
| | | GAACGAGCUGGGCAAGGAGAUCCGGCCCUGCCGGCUGAAGAAGCGGCCCCCCGUGCGGUCCGGAAAGCGGACCGCCGACGGCUCCGGAGGA |
| | | GGAAGCCCGAAGAAGAAGAGAAAGGUCAGCGAAAGCGCAACACCGGAAAGCGUCAGCGGAUGGAGACUGUUCAAGAAGAUCAGCUAGCUAG |
| | | CACCAGCCUCAAGAACACCCGAAUGGAGUCUCUAAGCUACAUAAUACCAACUUACACUUUACAAAAUGUUGUCCCCCAAAAUGUAGCCAUU |
| | | CGUAUCUGCUCCUAAUAAAAAGAAAGUUUCUUCACAUUCUCUCGAGAAAAAAAAAAAAUGGAAAAAAAAAAAACGGAAAAAAAAAAAAGGU |
| | | AAAAAAAAAAAAUAUAAAAAAAAAAAACAUAAAAAAAAAAAACGAAAAAAAAAAAACGUAAAAAAAAAAAACUCAAAAAAAAAAAAGAUAA |
| | | AAAAAAAAAACCUAAAAAAAAAAAAUGUAAAAAAAAAAAAGGGAAAAAAAAAAAACGCAAAAAAAAAAAACACAAAAAAAAAAAAUGCAAA |
| | | AAAAAAAAAUCGAAAAAAAAAAAAUCUAAAAAAAAAAAACGAAAAAAAAAAAACCCAAAAAAAAAAAAGACAAAAAAAAAAAAUAGAAAAA |
| | | AAAAAAAGUUAAAAAAAAAAAACUGAAAAAAAAAAAAUUUAAAAAAAAAAAAUCUAG |
| 84 | Cas9- | AUGGACAAGAAGUACUCCAUCGGCCUGGACAUCGGCACCAACUCCGUGGGCUGGGCCGUGAUCACCGACGAGUACAAGGUGCCCUCCAAGA |
| | Cas9 | AGUUCAAGGUGCUGGGCAACACCGACCGGCACUCCAUCAAGAAGAACCUGAUCGGCGCCCUGCUGUUCGACUCCGGCGAGACCGCCGAGGC |
| | fusion- | CACCCGGCUGAAGCGGACCGCCCGGCGGCGGUACACCCGGCGGAAGAACCGGAUCUGCUACCUGCAGGAGAUCUUCUCCAACGAGAUGGCC |
| | 81 | AAGGUGGACGACUCCUUCUUCCACCGGCUGGAGGAGUCCUUCCUGGUGGAGGAGGACAAGAAGCACGAGCGGCACCCCAUCUUCGGCAACA |
| | amino | UCGUGGACGAGGUGGCCUACCACGAGAAGUACCCCACCAUCUACCACCUGCGGAAGAAGCUGGUGGACUCCACCGACAAGGCCGACCUGCG |
| | acid | GCUGAUCUACCUGGCCCUGGCCCACAUGAUCAAGUUCCGGGGCCACUUCCUGAUCGAGGGCGACCUGGGGGGGGGGGGCUCCACCGAGAUC |
| | residue | ACCAAGGCCCCCCUGUCCGCCUCCAUGAUCAAGCGGUACGACGAGCACCACCAGGACCUGACCCUGCUGAAGGCCCUGGUGCGGCAGCAGC |
| | linker | UGCCCGAGAAGUACAAGGAGAUCUUCUUCGACCAGUCCAAGAACGGCUACGCCGGCUACAUCGACGGCGGCGCCUCCCAGGAGGAGUUCUA |
| | and | CAAGUUCAUCAAGCCCAUCCUGGAGAAGAUGGACGGCACCGAGGAGCUGCUGGUGAAGCUGAACCGGGAGGACCUGCUGCGGAAGCAGCGG |
| | HiBit | ACCUUCGACAACGGCUCCAUCCCCCACCAGAUCCACCUGGGCGAGCUGCACGCCAUCCUGCGGCGGCAGGAGGACUUCUACCCCUUCCUGA |
| | tag- | AGGACAACCGGGAGAAGAUCGAGAAGAUCCUGACCUUCCGGAUCCCCUACUACGUGGGCCCCCUGGCCCGGGGCAACUCCCGGUUCGCCUG |
| | SpyCas9 | GAUGACCCGGAAGUCCGAGGAGACCAUCACCCCCUGGAACUUCGAGGAGGUGGUGGACAAGGGCGCCUCCGCCCAGUCCUUCAUCGAGCGG |
| | without | AUGACCAACUUCGACAAGAACCUGCCCAACGAGAAGGUGCUGCCCAAGCACUCCCUGCUGUACGAGUACUUCACCGUGUACAACGAGCUGA |
| | Rec2 | CCAAGGUGAAGUACGUGACCGAGGGCAUGCGGAAGCCCGCCUUCCUGUCCGGCGAGCAGAAGAAGGCCAUCGUGGACCUGCUGUUCAAGAC |
| | domain | CAACCGGAAGGUGACCGUGAAGCAGCUGAAGGAGGACUACUUCAAGAAGAUCGAGUGCUUCGACUCCGUGGAGAUCUCCGGCGUGGAGGAC |
| | (mRNA | CGGUUCAACGCCUCCCUGGGCACCUACCACGACCUGCUGAAGAUCAUCAAGGACAAGGACUUCCUGGACAACGAGGAGAACGAGGACAUCC |
| | V)- | UGGAGGACAUCGUGCUGACCCUGACCCUGUUCGAGGACCGGGAGAUGAUCGAGGAGCGGCUGAAGACCUACGCCCACCUGUUCGACGACAA |
| | ORF | GGUGAUGAAGCAGCUGAAGCGGCGGCGGUACACCGGCUGGGGCCGGCUGUCCCGGAAGCUGAUCAACGGCAUCCGGGACAAGCAGUCCGGC |
| | sequence | AAGACCAUCCUGGACUUCCUGAAGUCCGACGGCUUCGCCAACCGGAACUUCAUGCAGCUGAUCCACGACGACUCCCUGACCUUCAAGGAGG |
| | | ACAUCCAGAAGGCCCAGGUGUCCGGCCAGGGCGACUCCCUGCACGAGCACAUCGCCAACCUGGCCGGCUCCCCCGCCAUCAAGAAGGGCAU |
| | | CCUGCAGACCGUGAAGGUGGUGGACGAGCUGGUGAAGGUGAUGGGCCGGCACAAGCCCGAGAACAUCGUGAUCGAGAUGGCCCGGGAGAAC |
| | | CAGACCACCCAGAAGGGCCAGAAGAACUCCCGGGAGCGGAUGAAGCGGAUCGAGGAGGGCAUCAAGGAGCUGGGCUCCCAGAUCCUGAAGG |
| | | AGCACCCCGUGGAGAACACCCAGCUGCAGAACGAGAAGCUGUACCUGUACUACCUGCAGAACGGCCGGGACAUGUACGUGGACCAGGAGCU |
| | | GGACAUCAACCGGCUGUCCGACUACGACGUGGACCACAUCGUGCCCCAGUCCUUCCUGAAGGACGACUCCAUCGACAACAAGGUGCUGACC |
| | | CGGUCCGACAAGAACCGGGGCAAGUCCGACAACGUGCCCUCCGAGGAGGUGGUGAAGAAGAUGAAGAACUACUGGCGGCAGCUGCUGAACG |
| | | CCAAGCUGAUCACCCAGCGGAAGUUCGACAACCUGACCAAGGCCGAGCGGGGCGGCCUGUCCGAGCUGGACAAGGCCGGCUUCAUCAAGCG |
| | | GCAGCUGGUGGAGACCCGGCAGAUCACCAAGCACGUGGCCCAGAUCCUGGACUCCCGGAUGAACACCAAGUACGACGAGAACGACAAGCUG |
| | | AUCCGGGAGGUGAAGGUGAUCACCCUGAAGUCCAAGCUGGUGUCCGACUUCCGGAAGGACUUCCAGUUCUACAAGGUGCGGGAGAUCAACA |
| | | ACUACCACCACGCCCACGACGCCUACCUGAACGCCGUGGUGGGCACCGCCCUGAUCAAGAAGUACCCCAAGCUGGAGUCCGAGUUCGUGUA |
| | | CGGCGACUACAAGGUGUACGACGUGCGGAAGAUGAUCGCCAAGUCCGAGCAGGAGAUCGGCAAGGCCACCGCCAAGUACUUCUUCUACUCC |
| | | AACAUCAUGAACUUCUUCAAGACCGAGAUCACCCUGGCCAACGGCGAGAUCCGGAAGCGGCCCCUGAUCGAGACCAACGGCGAGACCGGCG |
| | | AGAUCGUGUGGGACAAGGGCCGGGACUUCGCCACCGUGCGGAAGGUGCUGUCCAUGCCCCAGGUGAACAUCGUGAAGAAGACCGAGGUGCA |
| | | GACCGGCGGCUUCUCCAAGGAGUCCAUCCUGCCCAAGCGGAACUCCGACAAGCUGAUCGCCCGGAAGAAGGACUGGGACCCCAAGAAGUAC |
| | | GGCGGCUUCGACUCCCCCACCGUGGCCUACUCCGUGCUGGUGGUGGCCAAGGUGGAGAAGGGCAAGUCCAAGAAGCUGAAGUCCGUGAAGG |
| | | AGCUGCUGGGCAUCACCAUCAUGGAGCGGUCCUCCUUCGAGAAGAACCCCAUCGACUUCCUGGAGGCCAAGGGCUACAAGGAGGUGAAGAA |
| | | GGACCUGAUCAUCAAGCUGCCCAAGUACUCCCUGUUCGAGCUGGAGAACGGCCGGAAGCGGAUGCUGGCCUCCGCCGGCGAGCUGCAGAAG |
| | | GGCAACGAGCUGGCCCUGCCCUCCAAGUACGUGAACUUCCUGUACCUGGCCUCCCACUACGAGAAGCUGAAGGGCUCCCCCGAGGACAACG |
| | | AGCAGAAGCAGCUGUUCGUGGAGCAGCACAAGCACUACCUGGACGAGAUCAUCGAGCAGAUCUCCGAGUUCUCCAAGCGGGUGAUCCUGGC |
| | | CGACGCCAACCUGGACAAGGUGCUGUCCGCCUACAACAAGCACCGGGACAAGCCCAUCCGGGAGCAGGCCGAGAACAUCAUCCACCUGUUC |
| | | ACCCUGACCAACCUGGGCGCCCCCGCCGCCUUCAAGUACUUCGACACCACCAUCGACAAGAAGCGGUACACCUCCACCAAGGAGGUGCUGG |
| | | ACGCCACCCUGAUCCACCAGUCCAUCACCGGCCUGUACGAGACCCGGAUCGACCUGUCCCAGCUGGGGGGCGACGGCGCCCCCGAGUCCGC |
| | | CACCGAGUCCGGCGGCACCUCCACCGAGUCCGAGGGCUCCGCCGGCACCUCCACCGAGUCCGAGGGCUCCGCCGGCUCCGCCGGCUCCACC |
| | | UCCACCGAGGAGGGCACCUCCACCGAGUCCGAGGGCUCCGCCGGCACCUCCACCGAGUCCGAGGGCUCCGCCGGCACCUCCGAGUCCGCCA |
| | | CCGAGUCCGGCGGCACCUCCACCGAGUCCGAGGGCUCCUCCUCCGGUGCCGCCUUCAAGCCCAACCCCAUCAACUACAUCCUGGGCCUGGA |
| | | CAUCGGCAUCGCCUCCGUGGGCUGGGCCAUGGUGGAGAUCGACGAGGAGGAGAACCCCAUCCGGCUGAUCGACCUGGGCGUGCGGGUGUUC |
| | | GAGCGGGCCGAGGUGCCCAAGACCGGCGACUCCCUGGCCAUGGCCCGGCGGCUGGCCCGGUCCGUGCGGCGGCUGACCCGGCGGCGGGCCC |
| | | ACCGGCUGCUGCGGGCCCGGCGGCUGCUGAAGCGGGAGGGCGUGCUGCAGGCCGCCGACUUCGACGAGAACGGCCUGAUCAAGUCCCUGCC |
| | | CAACACCCCCUGGCAGCUGCGGGCCGCCGCCCUGGACCGGAAGCUGACCCCCCUGGAGUGGUCCGCCGUGCUGCUGCACCUGAUCAAGCAC |
| | | CGGGGCUACCUGUCCCAGCGGAAGAACGAGGGCGAGACCGCCGACAAGGAGCUGGGCGCCCUGCUGAAGGGCGUGGCCAACAACGCCCACG |
| | | CCCUGCAGACCGGCGACUUCCGGACCCCCGCCGAGCUGGCCCUGAACAAGUUCGAGAAGGAGUCCGGCCACAUCCGGAACCAGCGGGGCGA |
| | | CUACUCCCACACCUUCUCCCGGAAGGACCUGCAGGCCGAGCUGAUCCUGCUGUUCGAGAAGCAGAAGGAGUUCGGCAACCCCCACGUGUCC |
| | | GGCGGCCUGAAGGAGGGCAUCGAGACCCUGCUGAUGACCCAGCGGCCCGCCCUGUCCGGCGACGCCGUGCAGAAGAUGCUGGGCCACUGCA |
| | | CCUUCGAGCCCGCCGAGCCCAAGGCCGCCAAGAACACCUACACCGCCGAGCGGUUCAUCUGGCUGACCAAGCUGAACAACCUGCGGAUCCU |
| | | GGAGCAGGGCUCCGAGCGGCCCCUGACCGACACCGAGCGGGCCACCCUGAUGGACGAGCCCUACCGGAAGUCCAAGCUGACCUACGCCCAG |
| | | GCCCGGAAGCUGCUGGGCCUGGAGGACACCGCCUUCUUCAAGGGCCUGCGGUACGGCAAGGACAACGCCGAGGCCUCCACCCUGAUGGAGA |
| | | UGAAGGCCUACCACGCCAUCUCCCGGGCCCUGGAGAAGGAGGGCCUGAAGGACAAGAAGUCCCCCCUGAACCUGUCCUCCGAGCUGCAGGA |
| | | CGAGAUCGGCACCGCCUUCUCCCUGUUCAAGACCGACGAGGACAUCACCGGCCGGCUGAAGGACCGGGUGCAGCCCGAGAUCCUGGAGGCC |
| | | CUGCUGAAGCACAUCUCCUUCGACAAGUUCGUGCAGAUCUCCCUGAAGGCCCUGCGGCGGAUCGUGCCCCUGAUGGAGCAGGGCAAGCGGU |
| | | ACGACGAGGCCUGCGCCGAGAUCUACGGCGACCACUACGGCAAGAAGAACACCGAGGAGAAGAUCUACCUGCCCCCCAUCCCCGCCGACGA |
| | | GAUCCGGAACCCCGUGGUGCUGCGGGCCCUGUCCCAGGCCCGGAAGGUGAUCAACGGCGUGGUGCGGCGGUACGGCUCCCCCGCCCGGAUC |
| | | CACAUCGAGACCGCCCGGGAGGUGGGCAAGUCCUUCAAGGACCGGAAGGAGAUCGAGAAGCGGCAGGAGGAGAACCGGAAGGACCGGGAGA |
| | | AGGCCGCCGCCAAGUUCCGGGAGUACUUCCCCAACUUCGUGGGCGAGCCCAAGUCCAAGGACAUCCUGAAGCUGCGGCUGUACGAGCAGCA |
| | | GCACGGCAAGUGCCUGUACUCCGGCAAGGAGAUCAACCUGGUGCGGCUGAACGAGAAGGGCUACGUGGAGAUCGACCACGCCCUGCCCUUC |
| | | UCCCGGACCUGGGACGACUCCUUCAACAACAAGGUGCUGGUGCUGGGCUCCGAGAACCAGAACAAGGGCAACCAGACCCCCUACGAGUACU |
| | | UCAACGGCAAGGACAACUCCCGGGAGUGGCAGGAGUUCAAGGCCCGGGUGGAGACCUCCCGGUUCCCCCGGUCCAAGAAGCAGCGGAUCCU |
| | | GCUGCAGAAGUUCGACGAGGACGGCUUCAAGGAGUGCAACCUGAACGACACCCGGUACGUGAACCGCUUCCUGUGCCAGUUCGUGGCCGAC |
| | | CACAUCCUGCUGACCGGCAAGGGCAAGCGGCGGGUGUUCGCCUCCAACGGCCAGAUCACCAACCUGCUGCGGGGCUUCUGGGGCCUGCGGA |
| | | AGGUGCGGGCCGAGAACGACCGGCACCACGCCCUGGACGCCGUGGUGGUGGCCUGCUCCACCGUGGCCAUGCAGCAGAAGAUCACCCGGUU |
| | | CGUGCGGUACAAGGAGAUGAACGCCUUCGACGGCAAGACCAUCGACAAGGAGACCGGCAAGGUGCUGCACCAGAAGACCCACUUCCCCCAG |
| | | CCCUGGGAGUUCUUCGCCCAGGAGGUGAUGAUCCGGGUGUUCGGCAAGCCCGACGGCAAGCCCGAGUUCGAGGAGGCCGACACCCCCGAGA |
| | | AGCUGCGGACCCUGCUGGCCGAGAAGCUGUCCUCCCGGCCCGAGGCCGUGCACGAGUACGUGACCCCCCUGUUCGUGUCCCGGGCCCCCAA |
| | | CCGGAAGAUGUCCGGCGCCCACAAGGACACCCUGCGGUCCGCCAAGCGGUUCGUGAAGCACAACGAGAAGAUCUCCGUGAAGCGGGUGUGG |
| | | CUGACCGAGAUCAAGCUGGCCGACCUGGAGAACAUGGUGAACUACAAGAACGGCCGGGAGAUCGAGCUGUACGAGGCCCUGAAGGCCCGGC |
| | | UGGAGGCCUACGGCGGCAACGCCAAGCAGGCCUUCGACCCCAAGGACAACCCCUUCUACAAGAAGGGCGGCCAGCUGGUGAAGGCCGUGCG |
| | | GGUGGAGAAGACCCAGGAGUCCGGCGUGCUGCUGAACAAGAAGAACGCCUACACCAUCGCCGACAACGGCGACAUGGUGCGGGUGGACGUG |
| | | UUCUGCAAGGUGGACAAGAAGGGCAAGAACCAGUACUUCAUCGUGCCCAUCUACGCCUGGCAGGUGGCCGAGAACAUCCUGCCCGACAUCG |
| | | ACUGCAAGGGCUACCGGAUCGACGACUCCUACACCUUCUGCUUCUCCCUGCACAAGUACGACCUGAUCGCCUUCCAGAAGGACGAGAAGUC |
| | | CAAGGUGGAGUUCGCCUACUACAUCAACUGCGACUCCUCCAACGGCCGGUUCUACCUGGCCUGGCACGACAAGGGCUCCAAGGAGCAGCAG |
| | | UUCCGGAUCUCCACCCAGAACCUGGUGCUGAUCCAGAAGUACCAGGUGAACGAGCUGGGCAAGGAGAUCCGGCCCUGCCGGCUGAAGAAGC |
| | | GGCCCCCCGUGCGGUCCGGAAAGCGGACCGCCGACGGCUCCGGAGGAGGAAGCCCGAAGAAGAAGAGAAAGGUCAGCGAAAGCGCAACACC |
| | | GGAAAGCGUCAGCGGAUGGAGACUGUUCAAGAAGAUCAGCUAG |
| 85 | Cas9- | MDKKYSIGLDIGTNSVGWAVITDEYKVPSKKFKVLGNTDRHSIKKNLIGALLFDSGETAEATRLKRTARRRYTRRKNRICYLQEIFSNEMA |
| | Cas9 | KVDDSFFHRLEESFLVEEDKKHERHPIFGNIVDEVAYHEKYPTIYHLRKKLVDSTDKADLRLIYLALAHMIKFRGHFLIEGDLGGGGSTEI |
| | fusion- | TKAPLSASMIKRYDEHHQDLTLLKALVRQQLPEKYKEIFFDQSKNGYAGYIDGGASQEEFYKFIKPILEKMDGTEELLVKLNREDLLRKQR |
| | 81 | TFDNGSIPHQIHLGELHAILRRQEDFYPFLKDNREKIEKILTFRIPYYVGPLARGNSRFAWMTRKSEETITPWNFEEVVDKGASAQSFIER |
| | amino | MTNFDKNLPNEKVLPKHSLLYEYFTVYNELTKVKYVTEGMRKPAFLSGEQKKAIVDLLFKTNRKVTVKQLKEDYFKKIECFDSVEISGVED |
| | acid | RFNASLGTYHDLLKIIKDKDFLDNEENEDILEDIVLTLTLFEDREMIEERLKTYAHLFDDKVMKQLKRRRYTGWGRLSRKLINGIRDKQSG |
| | residue | KTILDFLKSDGFANRNFMQLIHDDSLTFKEDIQKAQVSGQGDSLHEHIANLAGSPAIKKGILQTVKVVDELVKVMGRHKPENIVIEMAREN |
| | linker | QTTQKGQKNSRERMKRIEEGIKELGSQILKEHPVENTQLQNEKLYLYYLQNGRDMYVDQELDINRLSDYDVDHIVPQSFLKDDSIDNKVLT |
| | and | RSDKNRGKSDNVPSEEVVKKMKNYWRQLLNAKLITQRKFDNLTKAERGGLSELDKAGFIKRQLVETRQITKHVAQILDSRMNTKYDENDKL |
| | HiBit | IREVKVITLKSKLVSDFRKDFQFYKVREINNYHHAHDAYLNAVVGTALIKKYPKLESEFVYGDYKVYDVRKMIAKSEQEIGKATAKYFFYS |
| | tag- | NIMNFFKTEITLANGEIRKRPLIETNGETGEIVWDKGRDFATVRKVLSMPQVNIVKKTEVQTGGFSKESILPKRNSDKLIARKKDWDPKKY |
| | SpyCas9 | GGFDSPTVAYSVLVVAKVEKGKSKKLKSVKELLGITIMERSSFEKNPIDFLEAKGYKEVKKDLIIKLPKYSLFELENGRKRMLASAGELQK |
| | without | GNELALPSKYVNFLYLASHYEKLKGSPEDNEQKQLFVEQHKHYLDEIIEQISEFSKRVILADANLDKVLSAYNKHRDKPIREQAENIIHLF |
| | Rec2 | TLTNLGAPAAFKYFDTTIDKKRYTSTKEVLDATLIHQSITGLYETRIDLSQLGGDGAPESATESGGTSTESEGSAGTSTESEGSAGSAGST |
| | domain | STEEGTSTESEGSAGTSTESEGSAGTSESATESGGTSTESEGSSSGAAFKPNPINYILGLDIGIASVGWAMVEIDEEENPIRLIDLGVRVF |
| | (mRNA | ERAEVPKTGDSLAMARRLARSVRRLTRRRAHRLLRARRLLKREGVLQAADFDENGLIKSLPNTPWQLRAAALDRKLTPLEWSAVLLHLIKH |
| | V)- | RGYLSQRKNEGETADKELGALLKGVANNAHALQTGDFRTPAELALNKFEKESGHIRNQRGDYSHTFSRKDLQAELILLFEKQKEFGNPHVS |
| | amino | GGLKEGIETLLMTQRPALSGDAVQKMLGHCTFEPAEPKAAKNTYTAERFIWLTKLNNLRILEQGSERPLTDTERATLMDEPYRKSKLTYAQ |
| | acid | ARKLLGLEDTAFFKGLRYGKDNAEASTLMEMKAYHAISRALEKEGLKDKKSPLNLSSELQDEIGTAFSLFKTDEDITGRLKDRVQPEILEA |
| | sequence | LLKHISFDKFVQISLKALRRIVPLMEQGKRYDEACAEIYGDHYGKKNTEEKIYLPPIPADEIRNPVVLRALSQARKVINGVVRRYGSPARI |
| | | HIETAREVGKSFKDRKEIEKRQEENRKDREKAAAKFREYFPNFVGEPKSKDILKLRLYEQQHGKCLYSGKEINLVRLNEKGYVEIDHALPF |
| | | SRTWDDSFNNKVLVLGSENQNKGNQTPYEYFNGKDNSREWQEFKARVETSRFPRSKKQRILLQKFDEDGFKECNLNDTRYVNRFLCQFVAD |
| | | HILLTGKGKRRVFASNGQITNLLRGFWGLRKVRAENDRHHALDAVVVACSTVAMQQKITRFVRYKEMNAFDGKTIDKETGKVLHQKTHFPQ |
| | | PWEFFAQEVMIRVFGKPDGKPEFEEADTPEKLRTLLAEKLSSRPEAVHEYVTPLFVSRAPNRKMSGAHKDTLRSAKRFVKHNEKISVKRVW |
| | | LTEIKLADLENMVNYKNGREIELYEALKARLEAYGGNAKQAFDPKDNPFYKKGGQLVKAVRVEKTQESGVLLNKKNAYTIADNGDMVRVDV |
| | | FCKVDKKGKNQYFIVPIYAWQVAENILPDIDCKGYRIDDSYTFCFSLHKYDLIAFQKDEKSKVEFAYYINCDSSNGRFYLAWHDKGSKEQQ |
| | | FRISTQNLVLIQKYQVNELGKEIRPCRLKKRPPVRSGKRTADGSGGGSPKKKRKVSESATPESVSGWRLFKKIS* |
| 86 | Cas9- | AUGGACAAGAAGUACUCCAUCGGCCUGGACAUCGGCACCAACUCCGUGGGCUGGGCCGUGAUCACCGACGAGUACAAGGUGCCCUCCAAGA |
| | Cas9 | AGUUCAAGGUGCUGGGCAACACCGACCGGCACUCCAUCAAGAAGAACCUGAUCGGCGCCCUGCUGUUCGACUCCGGCGAGACCGCCGAGGC |
| | fusion- | CACCCGGCUGAAGCGGACCGCCCGGCGGCGGUACACCCGGCGGAAGAACCGGAUCUGCUACCUGCAGGAGAUCUUCUCCAACGAGAUGGCC |
| | 81 | AAGGUGGACGACUCCUUCUUCCACCGGCUGGAGGAGUCCUUCCUGGUGGAGGAGGACAAGAAGCACGAGCGGCACCCCAUCUUCGGCAACA |
| | amino | UCGUGGACGAGGUGGCCUACCACGAGAAGUACCCCACCAUCUACCACCUGCGGAAGAAGCUGGUGGACUCCACCGACAAGGCCGACCUGCG |
| | acid | GCUGAUCUACCUGGCCCUGGCCCACAUGAUCAAGUUCCGGGGCCACUUCCUGAUCGAGGGCGACCUGGGGGGGGGGGGCUCCACCGAGAUC |
| | residual | ACCAAGGCCCCCCUGUCCGCCUCCAUGAUCAAGCGGUACGACGAGCACCACCAGGACCUGACCCUGCUGAAGGCCCUGGUGCGGCAGCAGC |
| | linker | UGCCCGAGAAGUACAAGGAGAUCUUCUUCGACCAGUCCAAGAACGGCUACGCCGGCUACAUCGACGGCGGCGCCUCCCAGGAGGAGUUCUA |
| | with | CAAGUUCAUCAAGCCCAUCCUGGAGAAGAUGGACGGCACCGAGGAGCUGCUGGUGAAGCUGAACCGGGAGGACCUGCUGCGGAAGCAGCGG |
| | SpyCas9 | ACCUUCGACAACGGCUCCAUCCCCCACCAGAUCCACCUGGGCGAGCUGCACGCCAUCCUGCGGCGGCAGGAGGACUUCUACCCCUUCCUGA |
| | without | AGGACAACCGGGAGAAGAUCGAGAAGAUCCUGACCUUCCGGAUCCCCUACUACGUGGGCCCCCUGGCCCGGGGCAACUCCCGGUUCGCCUG |
| | Rec2 | GAUGACCCGGAAGUCCGAGGAGACCAUCACCCCCUGGAACUUCGAGGAGGUGGUGGACAAGGGCGCCUCCGCCCAGUCCUUCAUCGAGCGG |
| | domain | AUGACCAACUUCGACAAGAACCUGCCCAACGAGAAGGUGCUGCCCAAGCACUCCCUGCUGUACGAGUACUUCACCGUGUACAACGAGCUGA |
| | (mRNA | CCAAGGUGAAGUACGUGACCGAGGGCAUGCGGAAGCCCGCCUUCCUGUCCGGCGAGCAGAAGAAGGCCAUCGUGGACCUGCUGUUCAAGAC |
| | V)- | CAACCGGAAGGUGACCGUGAAGCAGCUGAAGGAGGACUACUUCAAGAAGAUCGAGUGCUUCGACUCCGUGGAGAUCUCCGGCGUGGAGGAC |
| | mRNA | CGGUUCAACGCCUCCCUGGGCACCUACCACGACCUGCUGAAGAUCAUCAAGGACAAGGACUUCCUGGACAACGAGGAGAACGAGGACAUCC |
| | sequence | UGGAGGACAUCGUGCUGACCCUGACCCUGUUCGAGGACCGGGAGAUGAUCGAGGAGCGGCUGAAGACCUACGCCCACCUGUUCGACGACAA |
| | | GGUGAUGAAGCAGCUGAAGCGGCGGCGGUACACCGGCUGGGGCCGGCUGUCCCGGAAGCUGAUCAACGGCAUCCGGGACAAGCAGUCCGGC |
| | | AAGACCAUCCUGGACUUCCUGAAGUCCGACGGCUUCGCCAACCGGAACUUCAUGCAGCUGAUCCACGACGACUCCCUGACCUUCAAGGAGG |
| | | ACAUCCAGAAGGCCCAGGUGUCCGGCCAGGGCGACUCCCUGCACGAGCACAUCGCCAACCUGGCCGGCUCCCCCGCCAUCAAGAAGGGCAU |
| | | CCUGCAGACCGUGAAGGUGGUGGACGAGCUGGUGAAGGUGAUGGGCCGGCACAAGCCCGAGAACAUCGUGAUCGAGAUGGCCCGGGAGAAC |
| | | CAGACCACCCAGAAGGGCCAGAAGAACUCCCGGGAGCGGAUGAAGCGGAUCGAGGAGGGCAUCAAGGAGCUGGGCUCCCAGAUCCUGAAGG |
| | | AGCACCCCGUGGAGAACACCCAGCUGCAGAACGAGAAGCUGUACCUGUACUACCUGCAGAACGGCCGGGACAUGUACGUGGACCAGGAGCU |
| | | GGACAUCAACCGGCUGUCCGACUACGACGUGGACCACAUCGUGCCCCAGUCCUUCCUGAAGGACGACUCCAUCGACAACAAGGUGCUGACC |
| | | CGGUCCGACAAGAACCGGGGCAAGUCCGACAACGUGCCCUCCGAGGAGGUGGUGAAGAAGAUGAAGAACUACUGGCGGCAGCUGCUGAACG |
| | | CCAAGCUGAUCACCCAGCGGAAGUUCGACAACCUGACCAAGGCCGAGCGGGGCGGCCUGUCCGAGCUGGACAAGGCCGGCUUCAUCAAGCG |
| | | GCAGCUGGUGGAGACCCGGCAGAUCACCAAGCACGUGGCCCAGAUCCUGGACUCCCGGAUGAACACCAAGUACGACGAGAACGACAAGCUG |
| | | AUCCGGGAGGUGAAGGUGAUCACCCUGAAGUCCAAGCUGGUGUCCGACUUCCGGAAGGACUUCCAGUUCUACAAGGUGCGGGAGAUCAACA |
| | | ACUACCACCACGCCCACGACGCCUACCUGAACGCCGUGGUGGGCACCGCCCUGAUCAAGAAGUACCCCAAGCUGGAGUCCGAGUUCGUGUA |
| | | CGGCGACUACAAGGUGUACGACGUGCGGAAGAUGAUCGCCAAGUCCGAGCAGGAGAUCGGCAAGGCCACCGCCAAGUACUUCUUCUACUCC |
| | | AACAUCAUGAACUUCUUCAAGACCGAGAUCACCCUGGCCAACGGCGAGAUCCGGAAGCGGCCCCUGAUCGAGACCAACGGCGAGACCGGCG |
| | | AGAUCGUGUGGGACAAGGGCCGGGACUUCGCCACCGUGCGGAAGGUGCUGUCCAUGCCCCAGGUGAACAUCGUGAAGAAGACCGAGGUGCA |
| | | GACCGGCGGCUUCUCCAAGGAGUCCAUCCUGCCCAAGCGGAACUCCGACAAGCUGAUCGCCCGGAAGAAGGACUGGGACCCCAAGAAGUAC |
| | | GGCGGCUUCGACUCCCCCACCGUGGCCUACUCCGUGCUGGUGGUGGCCAAGGUGGAGAAGGGCAAGUCCAAGAAGCUGAAGUCCGUGAAGG |
| | | AGCUGCUGGGCAUCACCAUCAUGGAGCGGUCCUCCUUCGAGAAGAACCCCAUCGACUUCCUGGAGGCCAAGGGCUACAAGGAGGUGAAGAA |
| | | GGACCUGAUCAUCAAGCUGCCCAAGUACUCCCUGUUCGAGCUGGAGAACGGCCGGAAGCGGAUGCUGGCCUCCGCCGGCGAGCUGCAGAAG |
| | | GGCAACGAGCUGGCCCUGCCCUCCAAGUACGUGAACUUCCUGUACCUGGCCUCCCACUACGAGAAGCUGAAGGGCUCCCCCGAGGACAACG |
| | | AGCAGAAGCAGCUGUUCGUGGAGCAGCACAAGCACUACCUGGACGAGAUCAUCGAGCAGAUCUCCGAGUUCUCCAAGCGGGUGAUCCUGGC |
| | | CGACGCCAACCUGGACAAGGUGCUGUCCGCCUACAACAAGCACCGGGACAAGCCCAUCCGGGAGCAGGCCGAGAACAUCAUCCACCUGUUC |
| | | ACCCUGACCAACCUGGGCGCCCCCGCCGCCUUCAAGUACUUCGACACCACCAUCGACAAGAAGCGGUACACCUCCACCAAGGAGGUGCUGG |
| | | ACGCCACCCUGAUCCACCAGUCCAUCACCGGCCUGUACGAGACCCGGAUCGACCUGUCCCAGCUGGGCGGCGACGGCGCCCCCGAGUCCGC |
| | | CACCGAGUCCGGCGGCACCUCCACCGAGUCCGAGGGCUCCGCCGGCACCUCCACCGAGUCCGAGGGCUCCGCCGGCUCCGCCGGCUCCACC |
| | | UCCACCGAGGAGGGCACCUCCACCGAGUCCGAGGGCUCCGCCGGCACCUCCACCGAGUCCGAGGGCUCCGCCGGCACCUCCGAGUCCGCCA |
| | | CCGAGUCCGGCGGCACCUCCACCGAGUCCGAGGGCUCCUCCUCCGGUGCCGCCUUCAAGCCCAACCCCAUCAACUACAUCCUGGGCCUGGA |
| | | CAUCGGCAUCGCCUCCGUGGGCUGGGCCAUGGUGGAGAUCGACGAGGAGGAGAACCCCAUCCGGCUGAUCGACCUGGGCGUGCGGGUGUUC |
| | | GAGCGGGCCGAGGUGCCCAAGACCGGCGACUCCCUGGCCAUGGCCCGGCGGCUGGCCCGGUCCGUGCGGCGGCUGACCCGGCGGCGGGCCC |
| | | ACCGGCUGCUGCGGGCCCGGCGGCUGCUGAAGCGGGAGGGCGUGCUGCAGGCCGCCGACUUCGACGAGAACGGCCUGAUCAAGUCCCUGCC |
| | | CAACACCCCCUGGCAGCUGCGGGCCGCCGCCCUGGACCGGAAGCUGACCCCCCUGGAGUGGUCCGCCGUGCUGCUGCACCUGAUCAAGCAC |
| | | CGGGGCUACCUGUCCCAGCGGAAGAACGAGGGCGAGACCGCCGACAAGGAGCUGGGCGCCCUGCUGAAGGGCGUGGCCAACAACGCCCACG |
| | | CCCUGCAGACCGGCGACUUCCGGACCCCCGCCGAGCUGGCCCUGAACAAGUUCGAGAAGGAGUCCGGCCACAUCCGGAACCAGCGGGGCGA |
| | | CUACUCCCACACCUUCUCCCGGAAGGACCUGCAGGCCGAGCUGAUCCUGCUGUUCGAGAAGCAGAAGGAGUUCGGCAACCCCCACGUGUCC |
| | | GGCGGCCUGAAGGAGGGCAUCGAGACCCUGCUGAUGACCCAGCGGCCCGCCCUGUCCGGCGACGCCGUGCAGAAGAUGCUGGGCCACUGCA |
| | | CCUUCGAGCCCGCCGAGCCCAAGGCCGCCAAGAACACCUACACCGCCGAGCGGUUCAUCUGGCUGACCAAGCUGAACAACCUGCGGAUCCU |
| | | GGAGCAGGGCUCCGAGCGGCCCCUGACCGACACCGAGCGGGCCACCCUGAUGGACGAGCCCUACCGGAAGUCCAAGCUGACCUACGCCCAG |
| | | GCCCGGAAGCUGCUGGGCCUGGAGGACACCGCCUUCUUCAAGGGCCUGCGGUACGGCAAGGACAACGCCGAGGCCUCCACCCUGAUGGAGA |
| | | UGAAGGCCUACCACGCCAUCUCCCGGGCCCUGGAGAAGGAGGGCCUGAAGGACAAGAAGUCCCCCCUGAACCUGUCCUCCGAGCUGCAGGA |
| | | CGAGAUCGGCACCGCCUUCUCCCUGUUCAAGACCGACGAGGACAUCACCGGCCGGCUGAAGGACCGGGUGCAGCCCGAGAUCCUGGAGGCC |
| | | CUGCUGAAGCACAUCUCCUUCGACAAGUUCGUGCAGAUCUCCCUGAAGGCCCUGCGGCGGAUCGUGCCCCUGAUGGAGCAGGGCAAGCGGU |
| | | ACGACGAGGCCUGCGCCGAGAUCUACGGCGACCACUACGGCAAGAAGAACACCGAGGAGAAGAUCUACCUGCCCCCCAUCCCCGCCGACGA |
| | | GAUCCGGAACCCCGUGGUGCUGCGGGCCCUGUCCCAGGCCCGGAAGGUGAUCAACGGCGUGGUGCGGCGGUACGGCUCCCCCGCCCGGAUC |
| | | CACAUCGAGACCGCCCGGGAGGUGGGCAAGUCCUUCAAGGACCGGAAGGAGAUCGAGAAGCGGCAGGAGGAGAACCGGAAGGACCGGGAGA |
| | | AGGCCGCCGCCAAGUUCCGGGAGUACUUCCCCAACUUCGUGGGCGAGCCCAAGUCCAAGGACAUCCUGAAGCUGCGGCUGUACGAGCAGCA |
| | | GCACGGCAAGUGCCUGUACUCCGGCAAGGAGAUCAACCUGGUGCGGCUGAACGAGAAGGGCUACGUGGAGAUCGACCACGCCCUGCCCUUC |
| | | UCCCGGACCUGGGACGACUCCUUCAACAACAAGGUGCUGGUGCUGGGCUCCGAGAACCAGAACAAGGGCAACCAGACCCCCUACGAGUACU |
| | | UCAACGGCAAGGACAACUCCCGGGAGUGGCAGGAGUUCAAGGCCCGGGUGGAGACCUCCCGGUUCCCCCGGUCCAAGAAGCAGCGGAUCCU |
| | | GCUGCAGAAGUUCGACGAGGACGGCUUCAAGGAGUGCAACCUGAACGACACCCGGUACGUGAACCGCUUCCUGUGCCAGUUCGUGGCCGAC |
| | | CACAUCCUGCUGACCGGCAAGGGCAAGCGGCGGGUGUUCGCCUCCAACGGCCAGAUCACCAACCUGCUGCGGGGCUUCUGGGGCCUGCGGA |
| | | AGGUGCGGGCCGAGAACGACCGGCACCACGCCCUGGACGCCGUGGUGGUGGCCUGCUCCACCGUGGCCAUGCAGCAGAAGAUCACCCGGUU |
| | | CGUGCGGUACAAGGAGAUGAACGCCUUCGACGGCAAGACCAUCGACAAGGAGACCGGCAAGGUGCUGCACCAGAAGACCCACUUCCCCCAG |
| | | CCCUGGGAGUUCUUCGCCCAGGAGGUGAUGAUCCGGGUGUUCGGCAAGCCCGACGGCAAGCCCGAGUUCGAGGAGGCCGACACCCCCGAGA |
| | | AGCUGCGGACCCUGCUGGCCGAGAAGCUGUCCUCCCGGCCCGAGGCCGUGCACGAGUACGUGACCCCCCUGUUCGUGUCCCGGGCCCCCAA |
| | | CCGGAAGAUGUCCGGCGCCCACAAGGACACCCUGCGGUCCGCCAAGCGGUUCGUGAAGCACAACGAGAAGAUCUCCGUGAAGCGGGUGUGG |
| | | CUGACCGAGAUCAAGCUGGCCGACCUGGAGAACAUGGUGAACUACAAGAACGGCCGGGAGAUCGAGCUGUACGAGGCCCUGAAGGCCCGGC |
| | | UGGAGGCCUACGGCGGCAACGCCAAGCAGGCCUUCGACCCCAAGGACAACCCCUUCUACAAGAAGGGCGGCCAGCUGGUGAAGGCCGUGCG |
| | | GGUGGAGAAGACCCAGGAGUCCGGCGUGCUGCUGAACAAGAAGAACGCCUACACCAUCGCCGACAACGGCGACAUGGUGCGGGUGGACGUG |
| | | UUCUGCAAGGUGGACAAGAAGGGCAAGAACCAGUACUUCAUCGUGCCCAUCUACGCCUGGCAGGUGGCCGAGAACAUCCUGCCCGACAUCG |
| | | ACUGCAAGGGCUACCGGAUCGACGACUCCUACACCUUCUGCUUCUCCCUGCACAAGUACGACCUGAUCGCCUUCCAGAAGGACGAGAAGUC |
| | | CAAGGUGGAGUUCGCCUACUACAUCAACUGCGACUCCUCCAACGGCCGGUUCUACCUGGCCUGGCACGACAAGGGCUCCAAGGAGCAGCAG |
| | | UUCCGGAUCUCCACCCAGAACCUGGUGCUGAUCCAGAAGUACCAGGUGAACGAGCUGGGCAAGGAGAUCCGGCCCUGCCGGCUGAAGAAGC |
| | | GGCCCCCCGUGCGGUCCGGAAAGCGGACCGCCGACGGCUCCGGAGGAGGAAGCCCGAAGAAGAAGAGAAAGGUCUAG |
| 87 | Cas9- | MDKKYSIGLDIGTNSVGWAVITDEYKVPSKKFKVLGNTDRHSIKKNLIGALLFDSGETAEATRLKRTARRRYTRRKNRICYLQEIFSNEMA |
| | Cas9 | KVDDSFFHRLEESFLVEEDKKHERHPIFGNIVDEVAYHEKYPTIYHLRKKLVDSTDKADLRLIYLALAHMIKFRGHFLIEGDLGGGGSTEI |
| | fusion- | TKAPLSASMIKRYDEHHQDLTLLKALVRQQLPEKYKEIFFDQSKNGYAGYIDGGASQEEFYKFIKPILEKMDGTEELLVKLNREDLLRKQR |
| | 81 | TFDNGSIPHQIHLGELHAILRRQEDFYPFLKDNREKIEKILTFRIPYYVGPLARGNSRFAWMTRKSEETITPWNFEEVVDKGASAQSFIER |
| | amino | MTNFDKNLPNEKVLPKHSLLYEYFTVYNELTKVKYVTEGMRKPAFLSGEQKKAIVDLLFKTNRKVTVKQLKEDYFKKIECFDSVEISGVED |
| | acid | RFNASLGTYHDLLKIIKDKDFLDNEENEDILEDIVLTLTLFEDREMIEERLKTYAHLFDDKVMKQLKRRRYTGWGRLSRKLINGIRDKQSG |
| | residual | KTILDFLKSDGFANRNFMQLIHDDSLTFKEDIQKAQVSGQGDSLHEHIANLAGSPAIKKGILQTVKVVDELVKVMGRHKPENIVIEMAREN |
| | linker | QTTQKGQKNSRERMKRIEEGIKELGSQILKEHPVENTQLQNEKLYLYYLQNGRDMYVDQELDINRLSDYDVDHIVPQSFLKDDSIDNKVLT |
| | with | RSDKNRGKSDNVPSEEVVKKMKNYWRQLLNAKLITQRKFDNLTKAERGGLSELDKAGFIKRQLVETRQITKHVAQILDSRMNTKYDENDKL |
| | SpyCas9 | IREVKVITLKSKLVSDFRKDFQFYKVREINNYHHAHDAYLNAVVGTALIKKYPKLESEFVYGDYKVYDVRKMIAKSEQEIGKATAKYFFYS |
| | without | NIMNFFKTEITLANGEIRKRPLIETNGETGEIVWDKGRDFATVRKVLSMPQVNIVKKTEVQTGGFSKESILPKRNSDKLIARKKDWDPKKY |
| | Rec2 | GGFDSPTVAYSVLVVAKVEKGKSKKLKSVKELLGITIMERSSFEKNPIDFLEAKGYKEVKKDLIIKLPKYSLFELENGRKRMLASAGELQK |
| | domain | GNELALPSKYVNFLYLASHYEKLKGSPEDNEQKQLFVEQHKHYLDEIIEQISEFSKRVILADANLDKVLSAYNKHRDKPIREQAENIIHLF |
| | (mRNA | TLTNLGAPAAFKYFDTTIDKKRYTSTKEVLDATLIHQSITGLYETRIDLSQLGGDGAPESATESGGTSTESEGSAGTSTESEGSAGSAGST |
| | V)- | STEEGTSTESEGSAGTSTESEGSAGTSESATESGGTSTESEGSSSGAAFKPNPINYILGLDIGIASVGWAMVEIDEEENPIRLIDLGVRVF |
| | amino | ERAEVPKTGDSLAMARRLARSVRRLTRRRAHRLLRARRLLKREGVLQAADFDENGLIKSLPNTPWQLRAAALDRKLTPLEWSAVLLHLIKH |
| | acid | RGYLSQRKNEGETADKELGALLKGVANNAHALQTGDFRTPAELALNKFEKESGHIRNQRGDYSHTFSRKDLQAELILLFEKQKEFGNPHVS |
| | sequence | GGLKEGIETLLMTQRPALSGDAVQKMLGHCTFEPAEPKAAKNTYTAERFIWLTKLNNLRILEQGSERPLTDTERATLMDEPYRKSKLTYAQ |
| | | ARKLLGLEDTAFFKGLRYGKDNAEASTLMEMKAYHAISRALEKEGLKDKKSPLNLSSELQDEIGTAFSLFKTDEDITGRLKDRVQPEILEA |
| | | LLKHISFDKFVQISLKALRRIVPLMEQGKRYDEACAEIYGDHYGKKNTEEKIYLPPIPADEIRNPVVLRALSQARKVINGVVRRYGSPARI |
| | | HIETAREVGKSFKDRKEIEKRQEENRKDREKAAAKFREYFPNFVGEPKSKDILKLRLYEQQHGKCLYSGKEINLVRLNEKGYVEIDHALPF |
| | | SRTWDDSFNNKVLVLGSENQNKGNQTPYEYFNGKDNSREWQEFKARVETSRFPRSKKQRILLQKFDEDGFKECNLNDTRYVNRFLCQFVAD |
| | | HILLTGKGKRRVFASNGQITNLLRGFWGLRKVRAENDRHHALDAVVVACSTVAMQQKITRFVRYKEMNAFDGKTIDKETGKVLHQKTHFPQ |
| | | PWEFFAQEVMIRVFGKPDGKPEFEEADTPEKLRTLLAEKLSSRPEAVHEYVTPLFVSRAPNRKMSGAHKDTLRSAKRFVKHNEKISVKRVW |
| | | LTEIKLADLENMVNYKNGREIELYEALKARLEAYGGNAKQAFDPKDNPFYKKGGQLVKAVRVEKTQESGVLLNKKNAYTIADNGDMVRVDV |
| | | FCKVDKKGKNQYFIVPIYAWQVAENILPDIDCKGYRIDDSYTFCFSLHKYDLIAFQKDEKSKVEFAYYINCDSSNGRFYLAWHDKGSKEQQ |
| | | FRISTQNLVLIQKYQVNELGKEIRPCRLKKRPPVRSGKRTADGSGGGSPKKKRKV* |
| 88 | Cas9- | GGGAAGCUCAGAAUAAACGCUCAACUUUGGCCGGAUCUGCCACCAUGGACAAGAAGUACUCCAUCGGCCUGGACAUCGGCACCAACUCCGU |
| | Cas9 | GGGCUGGGCCGUGAUCACCGACGAGUACAAGGUGCCCUCCAAGAAGUUCAAGGUGCUGGGCAACACCGACCGGCACUCCAUCAAGAAGAAC |
| | fusion- | CUGAUCGGCGCCCUGCUGUUCGACUCCGGCGAGACCGCCGAGGCCACCCGGCUGAAGCGGACCGCCCGGCGGCGGUACACCCGGCGGAAGA |
| | 81 | ACCGGAUCUGCUACCUGCAGGAGAUCUUCUCCAACGAGAUGGCCAAGGUGGACGACUCCUUCUUCCACCGGCUGGAGGAGUCCUUCCUGGU |
| | amino | GGAGGAGGACAAGAAGCACGAGCGGCACCCCAUCUUCGGCAACAUCGUGGACGAGGUGGCCUACCACGAGAAGUACCCCACCAUCUACCAC |
| | acid | CUGCGGAAGAAGCUGGUGGACUCCACCGACAAGGCCGACCUGCGGCUGAUCUACCUGGCCCUGGCCCACAUGAUCAAGUUCCGGGGCCACU |
| | residue | UCCUGAUCGAGGGCGACCUGAACCCCGACAACUCCGACGUGGACAAGCUGUUCAUCCAGCUGGUGCAGACCUACAACCAGCUGUUCGAGGA |
| | linker | GAACCCCAUCAACGCCUCCGGCGUGGACGCCAAGGCCAUCCUGUCCGCCCGGCUGUCCAAGUCCCGGCGGCUGGAGAACCUGAUCGCCCAG |
| | and | CUGCCCGGCGAGAAGAAGAACGGCCUGUUCGGCAACCUGAUCGCCCUGUCCCUGGGCCUGACCCCCAACUUCAAGUCCAACUUCGACCUGG |
| | HiBit | CCGAGGACGCCAAGCUGCAGCUGUCCAAGGACACCUACGACGACGACCUGGACAACCUGCUGGCCCAGAUCGGCGACCAGUACGCCGACCU |
| | tag- | GUUCCUGGCCGCCAAGAACCUGUCCGACGCCAUCCUGCUGUCCGACAUCCUGCGGGUGAACACCGAGAUCACCAAGGCCCCCCUGUCCGCC |
| | SpyCas9 | UCCAUGAUCAAGCGGUACGACGAGCACCACCAGGACCUGACCCUGCUGAAGGCCCUGGUGCGGCAGCAGCUGCCCGAGAAGUACAAGGAGA |
| | without | UCUUCUUCGACCAGUCCAAGAACGGCUACGCCGGCUACAUCGACGGCGGCGCCUCCCAGGAGGAGUUCUACAAGUUCAUCAAGCCCAUCCU |
| | Rec3 | GGAGAAGAUGGACGGCACCGAGGAGCUGCUGGUGAAGCUGAACCGGGAGGACCUGCUGCGGAAGCAGCGGACCUUCGACAACGGCUCCAUC |
| | domain | CCCCACCAGAUCCACCUGGGCGAGCUGCACGCCAUCCUGCGGCGGCAGGAGGACUUCUACCCCUUCCUGAAGGACAACCGGGAGAAGAUCG |
| | (mRNA | AGAAGAUCCUGACCUUCCGGAUCCCCUACUACGUGGGCCCCCUGGCCCGGGGCAACUCCCGGUUCGCCUGGAUGACCCGGAAGUCCGAGGA |
| | W)- | GACCAUCACCCCCUGGAACUUCGAGGAGGUGGUGGACAAGGGCGCCUCCGCCCAGUCCUUCAUCGAGCGGAUGACCGGCGGCUCCUCCGGC |
| | mRNA | CAGGGCGACUCCCUGCACGAGCACAUCGCCAACCUGGCCGGCUCCCCCGCCAUCAAGAAGGGCAUCCUGCAGACCGUGAAGGUGGUGGACG |
| | sequence | AGCUGGUGAAGGUGAUGGGCCGGCACAAGCCCGAGAACAUCGUGAUCGAGAUGGCCCGGGAGAACCAGACCACCCAGAAGGGCCAGAAGAA |
| | | CUCCCGGGAGCGGAUGAAGCGGAUCGAGGAGGGCAUCAAGGAGCUGGGCUCCCAGAUCCUGAAGGAGCACCCCGUGGAGAACACCCAGCUG |
| | | CAGAACGAGAAGCUGUACCUGUACUACCUGCAGAACGGCCGGGACAUGUACGUGGACCAGGAGCUGGACAUCAACCGGCUGUCCGACUACG |
| | | ACGUGGACCACAUCGUGCCCCAGUCCUUCCUGAAGGACGACUCCAUCGACAACAAGGUGCUGACCCGGUCCGACAAGAACCGGGGCAAGUC |
| | | CGACAACGUGCCCUCCGAGGAGGUGGUGAAGAAGAUGAAGAACUACUGGCGGCAGCUGCUGAACGCCAAGCUGAUCACCCAGCGGAAGUUC |
| | | GACAACCUGACCAAGGCCGAGCGGGGCGGCCUGUCCGAGCUGGACAAGGCCGGCUUCAUCAAGCGGCAGCUGGUGGAGACCCGGCAGAUCA |
| | | CCAAGCACGUGGCCCAGAUCCUGGACUCCCGGAUGAACACCAAGUACGACGAGAACGACAAGCUGAUCCGGGAGGUGAAGGUGAUCACCCU |
| | | GAAGUCCAAGCUGGUGUCCGACUUCCGGAAGGACUUCCAGUUCUACAAGGUGCGGGAGAUCAACAACUACCACCACGCCCACGACGCCUAC |
| | | CUGAACGCCGUGGUGGGCACCGCCCUGAUCAAGAAGUACCCCAAGCUGGAGUCCGAGUUCGUGUACGGCGACUACAAGGUGUACGACGUGC |
| | | GGAAGAUGAUCGCCAAGUCCGAGCAGGAGAUCGGCAAGGCCACCGCCAAGUACUUCUUCUACUCCAACAUCAUGAACUUCUUCAAGACCGA |
| | | GAUCACCCUGGCCAACGGCGAGAUCCGGAAGCGGCCCCUGAUCGAGACCAACGGCGAGACCGGCGAGAUCGUGUGGGACAAGGGCCGGGAC |
| | | UUCGCCACCGUGCGGAAGGUGCUGUCCAUGCCCCAGGUGAACAUCGUGAAGAAGACCGAGGUGCAGACCGGCGGCUUCUCCAAGGAGUCCA |
| | | UCCUGCCCAAGCGGAACUCCGACAAGCUGAUCGCCCGGAAGAAGGACUGGGACCCCAAGAAGUACGGCGGCUUCGACUCCCCCACCGUGGC |
| | | CUACUCCGUGCUGGUGGUGGCCAAGGUGGAGAAGGGCAAGUCCAAGAAGCUGAAGUCCGUGAAGGAGCUGCUGGGCAUCACCAUCAUGGAG |
| | | CGGUCCUCCUUCGAGAAGAACCCCAUCGACUUCCUGGAGGCCAAGGGCUACAAGGAGGUGAAGAAGGACCUGAUCAUCAAGCUGCCCAAGU |
| | | ACUCCCUGUUCGAGCUGGAGAACGGCCGGAAGCGGAUGCUGGCCUCCGCCGGCGAGCUGCAGAAGGGCAACGAGCUGGCCCUGCCCUCCAA |
| | | GUACGUGAACUUCCUGUACCUGGCCUCCCACUACGAGAAGCUGAAGGGCUCCCCCGAGGACAACGAGCAGAAGCAGCUGUUCGUGGAGCAG |
| | | CACAAGCACUACCUGGACGAGAUCAUCGAGCAGAUCUCCGAGUUCUCCAAGCGGGUGAUCCUGGCCGACGCCAACCUGGACAAGGUGCUGU |
| | | CCGCCUACAACAAGCACCGGGACAAGCCCAUCCGGGAGCAGGCCGAGAACAUCAUCCACCUGUUCACCCUGACCAACCUGGGCGCCCCCGC |
| | | CGCCUUCAAGUACUUCGACACCACCAUCGACAAGAAGCGGUACACCUCCACCAAGGAGGUGCUGGACGCCACCCUGAUCCACCAGUCCAUC |
| | | ACCGGCCUGUACGAGACCCGGAUCGACCUGUCCCAGCUGGGGGGCGACGGCGCCCCCGAGUCCGCCACCGAGUCCGGCGGCACCUCCACCG |
| | | AGUCCGAGGGCUCCGCCGGCACCUCCACCGAGUCCGAGGGCUCCGCCGGCUCCGCCGGCUCCACCUCCACCGAGGAGGGCACCUCCACCGA |
| | | GUCCGAGGGCUCCGCCGGCACCUCCACCGAGUCCGAGGGCUCCGCCGGCACCUCCGAGUCCGCCACCGAGUCCGGCGGCACCUCCACCGAG |
| | | UCCGAGGGCUCCUCCUCCGGUGCCGCCUUCAAGCCCAACCCCAUCAACUACAUCCUGGGCCUGGACAUCGGCAUCGCCUCCGUGGGCUGGG |
| | | CCAUGGUGGAGAUCGACGAGGAGGAGAACCCCAUCCGGCUGAUCGACCUGGGCGUGCGGGUGUUCGAGCGGGCCGAGGUGCCCAAGACCGG |
| | | CGACUCCCUGGCCAUGGCCCGGCGGCUGGCCCGGUCCGUGCGGCGGCUGACCCGGCGGCGGGCCCACCGGCUGCUGCGGGCCCGGCGGCUG |
| | | CUGAAGCGGGAGGGCGUGCUGCAGGCCGCCGACUUCGACGAGAACGGCCUGAUCAAGUCCCUGCCCAACACCCCCUGGCAGCUGCGGGCCG |
| | | CCGCCCUGGACCGGAAGCUGACCCCCCUGGAGUGGUCCGCCGUGCUGCUGCACCUGAUCAAGCACCGGGGCUACCUGUCCCAGCGGAAGAA |
| | | CGAGGGCGAGACCGCCGACAAGGAGCUGGGCGCCCUGCUGAAGGGCGUGGCCAACAACGCCCACGCCCUGCAGACCGGCGACUUCCGGACC |
| | | CCCGCCGAGCUGGCCCUGAACAAGUUCGAGAAGGAGUCCGGCCACAUCCGGAACCAGCGGGGCGACUACUCCCACACCUUCUCCCGGAAGG |
| | | ACCUGCAGGCCGAGCUGAUCCUGCUGUUCGAGAAGCAGAAGGAGUUCGGCAACCCCCACGUGUCCGGCGGCCUGAAGGAGGGCAUCGAGAC |
| | | CCUGCUGAUGACCCAGCGGCCCGCCCUGUCCGGCGACGCCGUGCAGAAGAUGCUGGGCCACUGCACCUUCGAGCCCGCCGAGCCCAAGGCC |
| | | GCCAAGAACACCUACACCGCCGAGCGGUUCAUCUGGCUGACCAAGCUGAACAACCUGCGGAUCCUGGAGCAGGGCUCCGAGCGGCCCCUGA |
| | | CCGACACCGAGCGGGCCACCCUGAUGGACGAGCCCUACCGGAAGUCCAAGCUGACCUACGCCCAGGCCCGGAAGCUGCUGGGCCUGGAGGA |
| | | CACCGCCUUCUUCAAGGGCCUGCGGUACGGCAAGGACAACGCCGAGGCCUCCACCCUGAUGGAGAUGAAGGCCUACCACGCCAUCUCCCGG |
| | | GCCCUGGAGAAGGAGGGCCUGAAGGACAAGAAGUCCCCCCUGAACCUGUCCUCCGAGCUGCAGGACGAGAUCGGCACCGCCUUCUCCCUGU |
| | | UCAAGACCGACGAGGACAUCACCGGCCGGCUGAAGGACCGGGUGCAGCCCGAGAUCCUGGAGGCCCUGCUGAAGCACAUCUCCUUCGACAA |
| | | GUUCGUGCAGAUCUCCCUGAAGGCCCUGCGGCGGAUCGUGCCCCUGAUGGAGCAGGGCAAGCGGUACGACGAGGCCUGCGCCGAGAUCUAC |
| | | GGCGACCACUACGGCAAGAAGAACACCGAGGAGAAGAUCUACCUGCCCCCCAUCCCCGCCGACGAGAUCCGGAACCCCGUGGUGCUGCGGG |
| | | CCCUGUCCCAGGCCCGGAAGGUGAUCAACGGCGUGGUGCGGCGGUACGGCUCCCCCGCCCGGAUCCACAUCGAGACCGCCCGGGAGGUGGG |
| | | CAAGUCCUUCAAGGACCGGAAGGAGAUCGAGAAGCGGCAGGAGGAGAACCGGAAGGACCGGGAGAAGGCCGCCGCCAAGUUCCGGGAGUAC |
| | | UUCCCCAACUUCGUGGGCGAGCCCAAGUCCAAGGACAUCCUGAAGCUGCGGCUGUACGAGCAGCAGCACGGCAAGUGCCUGUACUCCGGCA |
| | | AGGAGAUCAACCUGGUGCGGCUGAACGAGAAGGGCUACGUGGAGAUCGACCACGCCCUGCCCUUCUCCCGGACCUGGGACGACUCCUUCAA |
| | | CAACAAGGUGCUGGUGCUGGGCUCCGAGAACCAGAACAAGGGCAACCAGACCCCCUACGAGUACUUCAACGGCAAGGACAACUCCCGGGAG |
| | | UGGCAGGAGUUCAAGGCCCGGGUGGAGACCUCCCGGUUCCCCCGGUCCAAGAAGCAGCGGAUCCUGCUGCAGAAGUUCGACGAGGACGGCU |
| | | UCAAGGAGUGCAACCUGAACGACACCCGGUACGUGAACCGCUUCCUGUGCCAGUUCGUGGCCGACCACAUCCUGCUGACCGGCAAGGGCAA |
| | | GCGGCGGGUGUUCGCCUCCAACGGCCAGAUCACCAACCUGCUGCGGGGCUUCUGGGGCCUGCGGAAGGUGCGGGCCGAGAACGACCGGCAC |
| | | CACGCCCUGGACGCCGUGGUGGUGGCCUGCUCCACCGUGGCCAUGCAGCAGAAGAUCACCCGGUUCGUGCGGUACAAGGAGAUGAACGCCU |
| | | UCGACGGCAAGACCAUCGACAAGGAGACCGGCAAGGUGCUGCACCAGAAGACCCACUUCCCCCAGCCCUGGGAGUUCUUCGCCCAGGAGGU |
| | | GAUGAUCCGGGUGUUCGGCAAGCCCGACGGCAAGCCCGAGUUCGAGGAGGCCGACACCCCCGAGAAGCUGCGGACCCUGCUGGCCGAGAAG |
| | | CUGUCCUCCCGGCCCGAGGCCGUGCACGAGUACGUGACCCCCCUGUUCGUGUCCCGGGCCCCCAACCGGAAGAUGUCCGGCGCCCACAAGG |
| | | ACACCCUGCGGUCCGCCAAGCGGUUCGUGAAGCACAACGAGAAGAUCUCCGUGAAGCGGGUGUGGCUGACCGAGAUCAAGCUGGCCGACCU |
| | | GGAGAACAUGGUGAACUACAAGAACGGCCGGGAGAUCGAGCUGUACGAGGCCCUGAAGGCCCGGCUGGAGGCCUACGGCGGCAACGCCAAG |
| | | CAGGCCUUCGACCCCAAGGACAACCCCUUCUACAAGAAGGGCGGCCAGCUGGUGAAGGCCGUGCGGGUGGAGAAGACCCAGGAGUCCGGCG |
| | | UGCUGCUGAACAAGAAGAACGCCUACACCAUCGCCGACAACGGCGACAUGGUGCGGGUGGACGUGUUCUGCAAGGUGGACAAGAAGGGCAA |
| | | GAACCAGUACUUCAUCGUGCCCAUCUACGCCUGGCAGGUGGCCGAGAACAUCCUGCCCGACAUCGACUGCAAGGGCUACCGGAUCGACGAC |
| | | UCCUACACCUUCUGCUUCUCCCUGCACAAGUACGACCUGAUCGCCUUCCAGAAGGACGAGAAGUCCAAGGUGGAGUUCGCCUACUACAUCA |
| | | ACUGCGACUCCUCCAACGGCCGGUUCUACCUGGCCUGGCACGACAAGGGCUCCAAGGAGCAGCAGUUCCGGAUCUCCACCCAGAACCUGGU |
| | | GCUGAUCCAGAAGUACCAGGUGAACGAGCUGGGCAAGGAGAUCCGGCCCUGCCGGCUGAAGAAGCGGCCCCCCGUGCGGUCCGGAAAGCGG |
| | | ACCGCCGACGGCUCCGGAGGAGGAAGCCCGAAGAAGAAGAGAAAGGUCAGCGAAAGCGCAACACCGGAAAGCGUCAGCGGAUGGAGACUGU |
| | | UCAAGAAGAUCAGCUAGCUAGCACCAGCCUCAAGAACACCCGAAUGGAGUCUCUAAGCUACAUAAUACCAACUUACACUUUACAAAAUGUU |
| | | GUCCCCCAAAAUGUAGCCAUUCGUAUCUGCUCCUAAUAAAAAGAAAGUUUCUUCACAUUCUCUCGAGAAAAAAAAAAAAUGGAAAAAAAAA |
| | | AAACGGAAAAAAAAAAAAGGUAAAAAAAAAAAAUAUAAAAAAAAAAAACAUAAAAAAAAAAAACGAAAAAAAAAAAACGUAAAAAAAAAAA |
| | | ACUCAAAAAAAAAAAAGAUAAAAAAAAAAAACCUAAAAAAAAAAAAUGUAAAAAAAAAAAAGGGAAAAAAAAAAAACGCAAAAAAAAAAAA |
| | | CACAAAAAAAAAAAAUGCAAAAAAAAAAAAUCGAAAAAAAAAAAAUCUAAAAAAAAAAAACGAAAAAAAAAAAACCCAAAAAAAAAAAAGA |
| | | CAAAAAAAAAAAAUAGAAAAAAAAAAAAGUUAAAAAAAAAAAACUGAAAAAAAAAAAAUUUAAAAAAAAAAAAUCUAG |
| 89 | Cas9- | AUGGACAAGAAGUACUCCAUCGGCCUGGACAUCGGCACCAACUCCGUGGGCUGGGCCGUGAUCACCGACGAGUACAAGGUGCCCUCCAAGA |
| | Cas9 | AGUUCAAGGUGCUGGGCAACACCGACCGGCACUCCAUCAAGAAGAACCUGAUCGGCGCCCUGCUGUUCGACUCCGGCGAGACCGCCGAGGC |
| | fusion- | CACCCGGCUGAAGCGGACCGCCCGGCGGCGGUACACCCGGCGGAAGAACCGGAUCUGCUACCUGCAGGAGAUCUUCUCCAACGAGAUGGCC |
| | 81 | AAGGUGGACGACUCCUUCUUCCACCGGCUGGAGGAGUCCUUCCUGGUGGAGGAGGACAAGAAGCACGAGCGGCACCCCAUCUUCGGCAACA |
| | amino | UCGUGGACGAGGUGGCCUACCACGAGAAGUACCCCACCAUCUACCACCUGCGGAAGAAGCUGGUGGACUCCACCGACAAGGCCGACCUGCG |
| | acid | GCUGAUCUACCUGGCCCUGGCCCACAUGAUCAAGUUCCGGGGCCACUUCCUGAUCGAGGGCGACCUGAACCCCGACAACUCCGACGUGGAC |
| | residue | AAGCUGUUCAUCCAGCUGGUGCAGACCUACAACCAGCUGUUCGAGGAGAACCCCAUCAACGCCUCCGGCGUGGACGCCAAGGCCAUCCUGU |
| | linker | CCGCCCGGCUGUCCAAGUCCCGGCGGCUGGAGAACCUGAUCGCCCAGCUGCCCGGCGAGAAGAAGAACGGCCUGUUCGGCAACCUGAUCGC |
| | and | CCUGUCCCUGGGCCUGACCCCCAACUUCAAGUCCAACUUCGACCUGGCCGAGGACGCCAAGCUGCAGCUGUCCAAGGACACCUACGACGAC |
| | HiBit | GACCUGGACAACCUGCUGGCCCAGAUCGGCGACCAGUACGCCGACCUGUUCCUGGCCGCCAAGAACCUGUCCGACGCCAUCCUGCUGUCCG |
| | tag- | ACAUCCUGCGGGUGAACACCGAGAUCACCAAGGCCCCCCUGUCCGCCUCCAUGAUCAAGCGGUACGACGAGCACCACCAGGACCUGACCCU |
| | SpyCas9 | GCUGAAGGCCCUGGUGCGGCAGCAGCUGCCCGAGAAGUACAAGGAGAUCUUCUUCGACCAGUCCAAGAACGGCUACGCCGGCUACAUCGAC |
| | without | GGCGGCGCCUCCCAGGAGGAGUUCUACAAGUUCAUCAAGCCCAUCCUGGAGAAGAUGGACGGCACCGAGGAGCUGCUGGUGAAGCUGAACC |
| | Rec3 | GGGAGGACCUGCUGCGGAAGCAGCGGACCUUCGACAACGGCUCCAUCCCCCACCAGAUCCACCUGGGCGAGCUGCACGCCAUCCUGCGGCG |
| | domain | GCAGGAGGACUUCUACCCCUUCCUGAAGGACAACCGGGAGAAGAUCGAGAAGAUCCUGACCUUCCGGAUCCCCUACUACGUGGGCCCCCUG |
| | (mRNA | GCCCGGGGCAACUCCCGGUUCGCCUGGAUGACCCGGAAGUCCGAGGAGACCAUCACCCCCUGGAACUUCGAGGAGGUGGUGGACAAGGGCG |
| | W)- | CCUCCGCCCAGUCCUUCAUCGAGCGGAUGACCGGCGGCUCCUCCGGCCAGGGCGACUCCCUGCACGAGCACAUCGCCAACCUGGCCGGCUC |
| | ORF | CCCCGCCAUCAAGAAGGGCAUCCUGCAGACCGUGAAGGUGGUGGACGAGCUGGUGAAGGUGAUGGGCCGGCACAAGCCCGAGAACAUCGUG |
| | sequence | AUCGAGAUGGCCCGGGAGAACCAGACCACCCAGAAGGGCCAGAAGAACUCCCGGGAGCGGAUGAAGCGGAUCGAGGAGGGCAUCAAGGAGC |
| | | UGGGCUCCCAGAUCCUGAAGGAGCACCCCGUGGAGAACACCCAGCUGCAGAACGAGAAGCUGUACCUGUACUACCUGCAGAACGGCCGGGA |
| | | CAUGUACGUGGACCAGGAGCUGGACAUCAACCGGCUGUCCGACUACGACGUGGACCACAUCGUGCCCCAGUCCUUCCUGAAGGACGACUCC |
| | | AUCGACAACAAGGUGCUGACCCGGUCCGACAAGAACCGGGGCAAGUCCGACAACGUGCCCUCCGAGGAGGUGGUGAAGAAGAUGAAGAACU |
| | | ACUGGCGGCAGCUGCUGAACGCCAAGCUGAUCACCCAGCGGAAGUUCGACAACCUGACCAAGGCCGAGCGGGGCGGCCUGUCCGAGCUGGA |
| | | CAAGGCCGGCUUCAUCAAGCGGCAGCUGGUGGAGACCCGGCAGAUCACCAAGCACGUGGCCCAGAUCCUGGACUCCCGGAUGAACACCAAG |
| | | UACGACGAGAACGACAAGCUGAUCCGGGAGGUGAAGGUGAUCACCCUGAAGUCCAAGCUGGUGUCCGACUUCCGGAAGGACUUCCAGUUCU |
| | | ACAAGGUGCGGGAGAUCAACAACUACCACCACGCCCACGACGCCUACCUGAACGCCGUGGUGGGCACCGCCCUGAUCAAGAAGUACCCCAA |
| | | GCUGGAGUCCGAGUUCGUGUACGGCGACUACAAGGUGUACGACGUGCGGAAGAUGAUCGCCAAGUCCGAGCAGGAGAUCGGCAAGGCCACC |
| | | GCCAAGUACUUCUUCUACUCCAACAUCAUGAACUUCUUCAAGACCGAGAUCACCCUGGCCAACGGCGAGAUCCGGAAGCGGCCCCUGAUCG |
| | | AGACCAACGGCGAGACCGGCGAGAUCGUGUGGGACAAGGGCCGGGACUUCGCCACCGUGCGGAAGGUGCUGUCCAUGCCCCAGGUGAACAU |
| | | CGUGAAGAAGACCGAGGUGCAGACCGGCGGCUUCUCCAAGGAGUCCAUCCUGCCCAAGCGGAACUCCGACAAGCUGAUCGCCCGGAAGAAG |
| | | GACUGGGACCCCAAGAAGUACGGCGGCUUCGACUCCCCCACCGUGGCCUACUCCGUGCUGGUGGUGGCCAAGGUGGAGAAGGGCAAGUCCA |
| | | AGAAGCUGAAGUCCGUGAAGGAGCUGCUGGGCAUCACCAUCAUGGAGCGGUCCUCCUUCGAGAAGAACCCCAUCGACUUCCUGGAGGCCAA |
| | | GGGCUACAAGGAGGUGAAGAAGGACCUGAUCAUCAAGCUGCCCAAGUACUCCCUGUUCGAGCUGGAGAACGGCCGGAAGCGGAUGCUGGCC |
| | | UCCGCCGGCGAGCUGCAGAAGGGCAACGAGCUGGCCCUGCCCUCCAAGUACGUGAACUUCCUGUACCUGGCCUCCCACUACGAGAAGCUGA |
| | | AGGGCUCCCCCGAGGACAACGAGCAGAAGCAGCUGUUCGUGGAGCAGCACAAGCACUACCUGGACGAGAUCAUCGAGCAGAUCUCCGAGUU |
| | | CUCCAAGCGGGUGAUCCUGGCCGACGCCAACCUGGACAAGGUGCUGUCCGCCUACAACAAGCACCGGGACAAGCCCAUCCGGGAGCAGGCC |
| | | GAGAACAUCAUCCACCUGUUCACCCUGACCAACCUGGGCGCCCCCGCCGCCUUCAAGUACUUCGACACCACCAUCGACAAGAAGCGGUACA |
| | | CCUCCACCAAGGAGGUGCUGGACGCCACCCUGAUCCACCAGUCCAUCACCGGCCUGUACGAGACCCGGAUCGACCUGUCCCAGCUGGGCGG |
| | | CGACGGCGCCCCCGAGUCCGCCACCGAGUCCGGCGGCACCUCCACCGAGUCCGAGGGCUCCGCCGGCACCUCCACCGAGUCCGAGGGCUCC |
| | | GCCGGCUCCGCCGGCUCCACCUCCACCGAGGAGGGCACCUCCACCGAGUCCGAGGGCUCCGCCGGCACCUCCACCGAGUCCGAGGGCUCCG |
| | | CCGGCACCUCCGAGUCCGCCACCGAGUCCGGCGGCACCUCCACCGAGUCCGAGGGCUCCUCCUCCGGUGCCGCCUUCAAGCCCAACCCCAU |
| | | CAACUACAUCCUGGGCCUGGACAUCGGCAUCGCCUCCGUGGGCUGGGCCAUGGUGGAGAUCGACGAGGAGGAGAACCCCAUCCGGCUGAUC |
| | | GACCUGGGCGUGCGGGUGUUCGAGCGGGCCGAGGUGCCCAAGACCGGCGACUCCCUGGCCAUGGCCCGGCGGCUGGCCCGGUCCGUGCGGC |
| | | GGCUGACCCGGCGGCGGGCCCACCGGCUGCUGCGGGCCCGGCGGCUGCUGAAGCGGGAGGGCGUGCUGCAGGCCGCCGACUUCGACGAGAA |
| | | CGGCCUGAUCAAGUCCCUGCCCAACACCCCCUGGCAGCUGCGGGCCGCCGCCCUGGACCGGAAGCUGACCCCCCUGGAGUGGUCCGCCGUG |
| | | CUGCUGCACCUGAUCAAGCACCGGGGCUACCUGUCCCAGCGGAAGAACGAGGGCGAGACCGCCGACAAGGAGCUGGGCGCCCUGCUGAAGG |
| | | GCGUGGCCAACAACGCCCACGCCCUGCAGACCGGCGACUUCCGGACCCCCGCCGAGCUGGCCCUGAACAAGUUCGAGAAGGAGUCCGGCCA |
| | | CAUCCGGAACCAGCGGGGCGACUACUCCCACACCUUCUCCCGGAAGGACCUGCAGGCCGAGCUGAUCCUGCUGUUCGAGAAGCAGAAGGAG |
| | | UUCGGCAACCCCCACGUGUCCGGCGGCCUGAAGGAGGGCAUCGAGACCCUGCUGAUGACCCAGCGGCCCGCCCUGUCCGGCGACGCCGUGC |
| | | AGAAGAUGCUGGGCCACUGCACCUUCGAGCCCGCCGAGCCCAAGGCCGCCAAGAACACCUACACCGCCGAGCGGUUCAUCUGGCUGACCAA |
| | | GCUGAACAACCUGCGGAUCCUGGAGCAGGGCUCCGAGCGGCCCCUGACCGACACCGAGCGGGCCACCCUGAUGGACGAGCCCUACCGGAAG |
| | | UCCAAGCUGACCUACGCCCAGGCCCGGAAGCUGCUGGGCCUGGAGGACACCGCCUUCUUCAAGGGCCUGCGGUACGGCAAGGACAACGCCG |
| | | AGGCCUCCACCCUGAUGGAGAUGAAGGCCUACCACGCCAUCUCCCGGGCCCUGGAGAAGGAGGGCCUGAAGGACAAGAAGUCCCCCCUGAA |
| | | CCUGUCCUCCGAGCUGCAGGACGAGAUCGGCACCGCCUUCUCCCUGUUCAAGACCGACGAGGACAUCACCGGCCGGCUGAAGGACCGGGUG |
| | | CAGCCCGAGAUCCUGGAGGCCCUGCUGAAGCACAUCUCCUUCGACAAGUUCGUGCAGAUCUCCCUGAAGGCCCUGCGGCGGAUCGUGCCCC |
| | | UGAUGGAGCAGGGCAAGCGGUACGACGAGGCCUGCGCCGAGAUCUACGGCGACCACUACGGCAAGAAGAACACCGAGGAGAAGAUCUACCU |
| | | GCCCCCCAUCCCCGCCGACGAGAUCCGGAACCCCGUGGUGCUGCGGGCCCUGUCCCAGGCCCGGAAGGUGAUCAACGGCGUGGUGCGGCGG |
| | | UACGGCUCCCCCGCCCGGAUCCACAUCGAGACCGCCCGGGAGGUGGGCAAGUCCUUCAAGGACCGGAAGGAGAUCGAGAAGCGGCAGGAGG |
| | | AGAACCGGAAGGACCGGGAGAAGGCCGCCGCCAAGUUCCGGGAGUACUUCCCCAACUUCGUGGGCGAGCCCAAGUCCAAGGACAUCCUGAA |
| | | GCUGCGGCUGUACGAGCAGCAGCACGGCAAGUGCCUGUACUCCGGCAAGGAGAUCAACCUGGUGCGGCUGAACGAGAAGGGCUACGUGGAG |
| | | AUCGACCACGCCCUGCCCUUCUCCCGGACCUGGGACGACUCCUUCAACAACAAGGUGCUGGUGCUGGGCUCCGAGAACCAGAACAAGGGCA |
| | | ACCAGACCCCCUACGAGUACUUCAACGGCAAGGACAACUCCCGGGAGUGGCAGGAGUUCAAGGCCCGGGUGGAGACCUCCCGGUUCCCCCG |
| | | GUCCAAGAAGCAGCGGAUCCUGCUGCAGAAGUUCGACGAGGACGGCUUCAAGGAGUGCAACCUGAACGACACCCGGUACGUGAACCGCUUC |
| | | CUGUGCCAGUUCGUGGCCGACCACAUCCUGCUGACCGGCAAGGGCAAGCGGCGGGUGUUCGCCUCCAACGGCCAGAUCACCAACCUGCUGC |
| | | GGGGCUUCUGGGGCCUGCGGAAGGUGCGGGCCGAGAACGACCGGCACCACGCCCUGGACGCCGUGGUGGUGGCCUGCUCCACCGUGGCCAU |
| | | GCAGCAGAAGAUCACCCGGUUCGUGCGGUACAAGGAGAUGAACGCCUUCGACGGCAAGACCAUCGACAAGGAGACCGGCAAGGUGCUGCAC |
| | | CAGAAGACCCACUUCCCCCAGCCCUGGGAGUUCUUCGCCCAGGAGGUGAUGAUCCGGGUGUUCGGCAAGCCCGACGGCAAGCCCGAGUUCG |
| | | AGGAGGCCGACACCCCCGAGAAGCUGCGGACCCUGCUGGCCGAGAAGCUGUCCUCCCGGCCCGAGGCCGUGCACGAGUACGUGACCCCCCU |
| | | GUUCGUGUCCCGGGCCCCCAACCGGAAGAUGUCCGGCGCCCACAAGGACACCCUGCGGUCCGCCAAGCGGUUCGUGAAGCACAACGAGAAG |
| | | AUCUCCGUGAAGCGGGUGUGGCUGACCGAGAUCAAGCUGGCCGACCUGGAGAACAUGGUGAACUACAAGAACGGCCGGGAGAUCGAGCUGU |
| | | ACGAGGCCCUGAAGGCCCGGCUGGAGGCCUACGGCGGCAACGCCAAGCAGGCCUUCGACCCCAAGGACAACCCCUUCUACAAGAAGGGCGG |
| | | CCAGCUGGUGAAGGCCGUGCGGGUGGAGAAGACCCAGGAGUCCGGCGUGCUGCUGAACAAGAAGAACGCCUACACCAUCGCCGACAACGGC |
| | | GACAUGGUGCGGGUGGACGUGUUCUGCAAGGUGGACAAGAAGGGCAAGAACCAGUACUUCAUCGUGCCCAUCUACGCCUGGCAGGUGGCCG |
| | | AGAACAUCCUGCCCGACAUCGACUGCAAGGGCUACCGGAUCGACGACUCCUACACCUUCUGCUUCUCCCUGCACAAGUACGACCUGAUCGC |
| | | CUUCCAGAAGGACGAGAAGUCCAAGGUGGAGUUCGCCUACUACAUCAACUGCGACUCCUCCAACGGCCGGUUCUACCUGGCCUGGCACGAC |
| | | AAGGGCUCCAAGGAGCAGCAGUUCCGGAUCUCCACCCAGAACCUGGUGCUGAUCCAGAAGUACCAGGUGAACGAGCUGGGCAAGGAGAUCC |
| | | GGCCCUGCCGGCUGAAGAAGCGGCCCCCCGUGCGGUCCGGAAAGCGGACCGCCGACGGCUCCGGAGGAGGAAGCCCGAAGAAGAAGAGAAA |
| | | GGUCAGCGAAAGCGCAACACCGGAAAGCGUCAGCGGAUGGAGACUGUUCAAGAAGAUCAGCUAG |
| 90 | Cas9- | MDKKYSIGLDIGTNSVGWAVITDEYKVPSKKFKVLGNTDRHSIKKNLIGALLFDSGETAEATRLKRTARRRYTRRKNRICYLQEIFSNEMA |
| | Cas9 | KVDDSFFHRLEESFLVEEDKKHERHPIFGNIVDEVAYHEKYPTIYHLRKKLVDSTDKADLRLIYLALAHMIKFRGHFLIEGDLNPDNSDVD |
| | fusion- | KLFIQLVQTYNQLFEENPINASGVDAKAILSARLSKSRRLENLIAQLPGEKKNGLFGNLIALSLGLTPNFKSNFDLAEDAKLQLSKDTYDD |
| | 81 | DLDNLLAQIGDQYADLFLAAKNLSDAILLSDILRVNTEITKAPLSASMIKRYDEHHQDLTLLKALVRQQLPEKYKEIFFDQSKNGYAGYID |
| | amino | GGASQEEFYKFIKPILEKMDGTEELLVKLNREDLLRKQRTFDNGSIPHQIHLGELHAILRRQEDFYPFLKDNREKIEKILTFRIPYYVGPL |
| | acid | ARGNSRFAWMTRKSEETITPWNFEEVVDKGASAQSFIERMTGGSSGQGDSLHEHIANLAGSPAIKKGILQTVKVVDELVKVMGRHKPENIV |
| | residue | IEMARENQTTQKGQKNSRERMKRIEEGIKELGSQILKEHPVENTQLQNEKLYLYYLQNGRDMYVDQELDINRLSDYDVDHIVPQSFLKDDS |
| | linker | IDNKVLTRSDKNRGKSDNVPSEEVVKKMKNYWRQLLNAKLITQRKFDNLTKAERGGLSELDKAGFIKRQLVETRQITKHVAQILDSRMNTK |
| | and | YDENDKLIREVKVITLKSKLVSDFRKDFQFYKVREINNYHHAHDAYLNAVVGTALIKKYPKLESEFVYGDYKVYDVRKMIAKSEQEIGKAT |
| | HiBit | AKYFFYSNIMNFFKTEITLANGEIRKRPLIETNGETGEIVWDKGRDFATVRKVLSMPQVNIVKKTEVQTGGFSKESILPKRNSDKLIARKK |
| | tag- | DWDPKKYGGFDSPTVAYSVLVVAKVEKGKSKKLKSVKELLGITIMERSSFEKNPIDFLEAKGYKEVKKDLIIKLPKYSLFELENGRKRMLA |
| | SpyCas9 | SAGELQKGNELALPSKYVNFLYLASHYEKLKGSPEDNEQKQLFVEQHKHYLDEIIEQISEFSKRVILADANLDKVLSAYNKHRDKPIREQA |
| | without | ENIIHLFTLTNLGAPAAFKYFDTTIDKKRYTSTKEVLDATLIHQSITGLYETRIDLSQLGGDGAPESATESGGTSTESEGSAGTSTESEGS |
| | Rec3 | AGSAGSTSTEEGTSTESEGSAGTSTESEGSAGTSESATESGGTSTESEGSSSGAAFKPNPINYILGLDIGIASVGWAMVEIDEEENPIRLI |
| | domain | DLGVRVFERAEVPKTGDSLAMARRLARSVRRLTRRRAHRLLRARRLLKREGVLQAADFDENGLIKSLPNTPWQLRAAALDRKLTPLEWSAV |
| | (mRNA | LLHLIKHRGYLSQRKNEGETADKELGALLKGVANNAHALQTGDFRTPAELALNKFEKESGHIRNQRGDYSHTFSRKDLQAELILLFEKQKE |
| | W)- | FGNPHVSGGLKEGIETLLMTQRPALSGDAVQKMLGHCTFEPAEPKAAKNTYTAERFIWLTKLNNLRILEQGSERPLTDTERATLMDEPYRK |
| | amino | SKLTYAQARKLLGLEDTAFFKGLRYGKDNAEASTLMEMKAYHAISRALEKEGLKDKKSPLNLSSELQDEIGTAFSLFKTDEDITGRLKDRV |
| | acid | QPEILEALLKHISFDKFVQISLKALRRIVPLMEQGKRYDEACAEIYGDHYGKKNTEEKIYLPPIPADEIRNPVVLRALSQARKVINGVVRR |
| | sequence | YGSPARIHIETAREVGKSFKDRKEIEKRQEENRKDREKAAAKFREYFPNFVGEPKSKDILKLRLYEQQHGKCLYSGKEINLVRLNEKGYVE |
| | | IDHALPFSRTWDDSFNNKVLVLGSENQNKGNQTPYEYFNGKDNSREWQEFKARVETSRFPRSKKQRILLQKFDEDGFKECNLNDTRYVNRF |
| | | LCQFVADHILLTGKGKRRVFASNGQITNLLRGFWGLRKVRAENDRHHALDAVVVACSTVAMQQKITRFVRYKEMNAFDGKTIDKETGKVLH |
| | | QKTHFPQPWEFFAQEVMIRVFGKPDGKPEFEEADTPEKLRTLLAEKLSSRPEAVHEYVTPLFVSRAPNRKMSGAHKDTLRSAKRFVKHNEK |
| | | ISVKRVWLTEIKLADLENMVNYKNGREIELYEALKARLEAYGGNAKQAFDPKDNPFYKKGGQLVKAVRVEKTQESGVLLNKKNAYTIADNG |
| | | DMVRVDVFCKVDKKGKNQYFIVPIYAWQVAENILPDIDCKGYRIDDSYTFCFSLHKYDLIAFQKDEKSKVEFAYYINCDSSNGRFYLAWHD |
| | | KGSKEQQFRISTQNLVLIQKYQVNELGKEIRPCRLKKRPPVRSGKRTADGSGGGSPKKKRKVSESATPESVSGWRLFKKIS* |
| 91 | Cas9- | AUGGACAAGAAGUACUCCAUCGGCCUGGACAUCGGCACCAACUCCGUGGGCUGGGCCGUGAUCACCGACGAGUACAAGGUGCCCUCCAAGA |
| | Cas9 | AGUUCAAGGUGCUGGGCAACACCGACCGGCACUCCAUCAAGAAGAACCUGAUCGGCGCCCUGCUGUUCGACUCCGGCGAGACCGCCGAGGC |
| | fusion- | CACCCGGCUGAAGCGGACCGCCCGGCGGCGGUACACCCGGCGGAAGAACCGGAUCUGCUACCUGCAGGAGAUCUUCUCCAACGAGAUGGCC |
| | 81 | AAGGUGGACGACUCCUUCUUCCACCGGCUGGAGGAGUCCUUCCUGGUGGAGGAGGACAAGAAGCACGAGCGGCACCCCAUCUUCGGCAACA |
| | amino | UCGUGGACGAGGUGGCCUACCACGAGAAGUACCCCACCAUCUACCACCUGCGGAAGAAGCUGGUGGACUCCACCGACAAGGCCGACCUGCG |
| | acid | GCUGAUCUACCUGGCCCUGGCCCACAUGAUCAAGUUCCGGGGCCACUUCCUGAUCGAGGGCGACCUGAACCCCGACAACUCCGACGUGGAC |
| | residual | AAGCUGUUCAUCCAGCUGGUGCAGACCUACAACCAGCUGUUCGAGGAGAACCCCAUCAACGCCUCCGGCGUGGACGCCAAGGCCAUCCUGU |
| | linker | CCGCCCGGCUGUCCAAGUCCCGGCGGCUGGAGAACCUGAUCGCCCAGCUGCCCGGCGAGAAGAAGAACGGCCUGUUCGGCAACCUGAUCGC |
| | with | CCUGUCCCUGGGCCUGACCCCCAACUUCAAGUCCAACUUCGACCUGGCCGAGGACGCCAAGCUGCAGCUGUCCAAGGACACCUACGACGAC |
| | SpyCas9 | GACCUGGACAACCUGCUGGCCCAGAUCGGCGACCAGUACGCCGACCUGUUCCUGGCCGCCAAGAACCUGUCCGACGCCAUCCUGCUGUCCG |
| | without | ACAUCCUGCGGGUGAACACCGAGAUCACCAAGGCCCCCCUGUCCGCCUCCAUGAUCAAGCGGUACGACGAGCACCACCAGGACCUGACCCU |
| | Rec3 | GCUGAAGGCCCUGGUGCGGCAGCAGCUGCCCGAGAAGUACAAGGAGAUCUUCUUCGACCAGUCCAAGAACGGCUACGCCGGCUACAUCGAC |
| | domain | GGCGGCGCCUCCCAGGAGGAGUUCUACAAGUUCAUCAAGCCCAUCCUGGAGAAGAUGGACGGCACCGAGGAGCUGCUGGUGAAGCUGAACC |
| | (mRNA | GGGAGGACCUGCUGCGGAAGCAGCGGACCUUCGACAACGGCUCCAUCCCCCACCAGAUCCACCUGGGCGAGCUGCACGCCAUCCUGCGGCG |
| | W)- | GCAGGAGGACUUCUACCCCUUCCUGAAGGACAACCGGGAGAAGAUCGAGAAGAUCCUGACCUUCCGGAUCCCCUACUACGUGGGCCCCCUG |
| | mRNA | GCCCGGGGCAACUCCCGGUUCGCCUGGAUGACCCGGAAGUCCGAGGAGACCAUCACCCCCUGGAACUUCGAGGAGGUGGUGGACAAGGGCG |
| | sequence | CCUCCGCCCAGUCCUUCAUCGAGCGGAUGACCGGCGGCUCCUCCGGCCAGGGCGACUCCCUGCACGAGCACAUCGCCAACCUGGCCGGCUC |
| | | CCCCGCCAUCAAGAAGGGCAUCCUGCAGACCGUGAAGGUGGUGGACGAGCUGGUGAAGGUGAUGGGCCGGCACAAGCCCGAGAACAUCGUG |
| | | AUCGAGAUGGCCCGGGAGAACCAGACCACCCAGAAGGGCCAGAAGAACUCCCGGGAGCGGAUGAAGCGGAUCGAGGAGGGCAUCAAGGAGC |
| | | UGGGCUCCCAGAUCCUGAAGGAGCACCCCGUGGAGAACACCCAGCUGCAGAACGAGAAGCUGUACCUGUACUACCUGCAGAACGGCCGGGA |
| | | CAUGUACGUGGACCAGGAGCUGGACAUCAACCGGCUGUCCGACUACGACGUGGACCACAUCGUGCCCCAGUCCUUCCUGAAGGACGACUCC |
| | | AUCGACAACAAGGUGCUGACCCGGUCCGACAAGAACCGGGGCAAGUCCGACAACGUGCCCUCCGAGGAGGUGGUGAAGAAGAUGAAGAACU |
| | | ACUGGCGGCAGCUGCUGAACGCCAAGCUGAUCACCCAGCGGAAGUUCGACAACCUGACCAAGGCCGAGCGGGGCGGCCUGUCCGAGCUGGA |
| | | CAAGGCCGGCUUCAUCAAGCGGCAGCUGGUGGAGACCCGGCAGAUCACCAAGCACGUGGCCCAGAUCCUGGACUCCCGGAUGAACACCAAG |
| | | UACGACGAGAACGACAAGCUGAUCCGGGAGGUGAAGGUGAUCACCCUGAAGUCCAAGCUGGUGUCCGACUUCCGGAAGGACUUCCAGUUCU |
| | | ACAAGGUGCGGGAGAUCAACAACUACCACCACGCCCACGACGCCUACCUGAACGCCGUGGUGGGCACCGCCCUGAUCAAGAAGUACCCCAA |
| | | GCUGGAGUCCGAGUUCGUGUACGGCGACUACAAGGUGUACGACGUGCGGAAGAUGAUCGCCAAGUCCGAGCAGGAGAUCGGCAAGGCCACC |
| | | GCCAAGUACUUCUUCUACUCCAACAUCAUGAACUUCUUCAAGACCGAGAUCACCCUGGCCAACGGCGAGAUCCGGAAGCGGCCCCUGAUCG |
| | | AGACCAACGGCGAGACCGGCGAGAUCGUGUGGGACAAGGGCCGGGACUUCGCCACCGUGCGGAAGGUGCUGUCCAUGCCCCAGGUGAACAU |
| | | CGUGAAGAAGACCGAGGUGCAGACCGGCGGCUUCUCCAAGGAGUCCAUCCUGCCCAAGCGGAACUCCGACAAGCUGAUCGCCCGGAAGAAG |
| | | GACUGGGACCCCAAGAAGUACGGCGGCUUCGACUCCCCCACCGUGGCCUACUCCGUGCUGGUGGUGGCCAAGGUGGAGAAGGGCAAGUCCA |
| | | AGAAGCUGAAGUCCGUGAAGGAGCUGCUGGGCAUCACCAUCAUGGAGCGGUCCUCCUUCGAGAAGAACCCCAUCGACUUCCUGGAGGCCAA |
| | | GGGCUACAAGGAGGUGAAGAAGGACCUGAUCAUCAAGCUGCCCAAGUACUCCCUGUUCGAGCUGGAGAACGGCCGGAAGCGGAUGCUGGCC |
| | | UCCGCCGGCGAGCUGCAGAAGGGCAACGAGCUGGCCCUGCCCUCCAAGUACGUGAACUUCCUGUACCUGGCCUCCCACUACGAGAAGCUGA |
| | | AGGGCUCCCCCGAGGACAACGAGCAGAAGCAGCUGUUCGUGGAGCAGCACAAGCACUACCUGGACGAGAUCAUCGAGCAGAUCUCCGAGUU |
| | | CUCCAAGCGGGUGAUCCUGGCCGACGCCAACCUGGACAAGGUGCUGUCCGCCUACAACAAGCACCGGGACAAGCCCAUCCGGGAGCAGGCC |
| | | GAGAACAUCAUCCACCUGUUCACCCUGACCAACCUGGGCGCCCCCGCCGCCUUCAAGUACUUCGACACCACCAUCGACAAGAAGCGGUACA |
| | | CCUCCACCAAGGAGGUGCUGGACGCCACCCUGAUCCACCAGUCCAUCACCGGCCUGUACGAGACCCGGAUCGACCUGUCCCAGCUGGGCGG |
| | | CGACGGCGCCCCCGAGUCCGCCACCGAGUCCGGCGGCACCUCCACCGAGUCCGAGGGCUCCGCCGGCACCUCCACCGAGUCCGAGGGCUCC |
| | | GCCGGCUCCGCCGGCUCCACCUCCACCGAGGAGGGCACCUCCACCGAGUCCGAGGGCUCCGCCGGCACCUCCACCGAGUCCGAGGGCUCCG |
| | | CCGGCACCUCCGAGUCCGCCACCGAGUCCGGCGGCACCUCCACCGAGUCCGAGGGCUCCUCCUCCGGUGCCGCCUUCAAGCCCAACCCCAU |
| | | CAACUACAUCCUGGGCCUGGACAUCGGCAUCGCCUCCGUGGGCUGGGCCAUGGUGGAGAUCGACGAGGAGGAGAACCCCAUCCGGCUGAUC |
| | | GACCUGGGCGUGCGGGUGUUCGAGCGGGCCGAGGUGCCCAAGACCGGCGACUCCCUGGCCAUGGCCCGGCGGCUGGCCCGGUCCGUGCGGC |
| | | GGCUGACCCGGCGGCGGGCCCACCGGCUGCUGCGGGCCCGGCGGCUGCUGAAGCGGGAGGGCGUGCUGCAGGCCGCCGACUUCGACGAGAA |
| | | CGGCCUGAUCAAGUCCCUGCCCAACACCCCCUGGCAGCUGCGGGCCGCCGCCCUGGACCGGAAGCUGACCCCCCUGGAGUGGUCCGCCGUG |
| | | CUGCUGCACCUGAUCAAGCACCGGGGCUACCUGUCCCAGCGGAAGAACGAGGGCGAGACCGCCGACAAGGAGCUGGGCGCCCUGCUGAAGG |
| | | GCGUGGCCAACAACGCCCACGCCCUGCAGACCGGCGACUUCCGGACCCCCGCCGAGCUGGCCCUGAACAAGUUCGAGAAGGAGUCCGGCCA |
| | | CAUCCGGAACCAGCGGGGCGACUACUCCCACACCUUCUCCCGGAAGGACCUGCAGGCCGAGCUGAUCCUGCUGUUCGAGAAGCAGAAGGAG |
| | | UUCGGCAACCCCCACGUGUCCGGCGGCCUGAAGGAGGGCAUCGAGACCCUGCUGAUGACCCAGCGGCCCGCCCUGUCCGGCGACGCCGUGC |
| | | AGAAGAUGCUGGGCCACUGCACCUUCGAGCCCGCCGAGCCCAAGGCCGCCAAGAACACCUACACCGCCGAGCGGUUCAUCUGGCUGACCAA |
| | | GCUGAACAACCUGCGGAUCCUGGAGCAGGGCUCCGAGCGGCCCCUGACCGACACCGAGCGGGCCACCCUGAUGGACGAGCCCUACCGGAAG |
| | | UCCAAGCUGACCUACGCCCAGGCCCGGAAGCUGCUGGGCCUGGAGGACACCGCCUUCUUCAAGGGCCUGCGGUACGGCAAGGACAACGCCG |
| | | AGGCCUCCACCCUGAUGGAGAUGAAGGCCUACCACGCCAUCUCCCGGGCCCUGGAGAAGGAGGGCCUGAAGGACAAGAAGUCCCCCCUGAA |
| | | CCUGUCCUCCGAGCUGCAGGACGAGAUCGGCACCGCCUUCUCCCUGUUCAAGACCGACGAGGACAUCACCGGCCGGCUGAAGGACCGGGUG |
| | | CAGCCCGAGAUCCUGGAGGCCCUGCUGAAGCACAUCUCCUUCGACAAGUUCGUGCAGAUCUCCCUGAAGGCCCUGCGGCGGAUCGUGCCCC |
| | | UGAUGGAGCAGGGCAAGCGGUACGACGAGGCCUGCGCCGAGAUCUACGGCGACCACUACGGCAAGAAGAACACCGAGGAGAAGAUCUACCU |
| | | GCCCCCCAUCCCCGCCGACGAGAUCCGGAACCCCGUGGUGCUGCGGGCCCUGUCCCAGGCCCGGAAGGUGAUCAACGGCGUGGUGCGGCGG |
| | | UACGGCUCCCCCGCCCGGAUCCACAUCGAGACCGCCCGGGAGGUGGGCAAGUCCUUCAAGGACCGGAAGGAGAUCGAGAAGCGGCAGGAGG |
| | | AGAACCGGAAGGACCGGGAGAAGGCCGCCGCCAAGUUCCGGGAGUACUUCCCCAACUUCGUGGGCGAGCCCAAGUCCAAGGACAUCCUGAA |
| | | GCUGCGGCUGUACGAGCAGCAGCACGGCAAGUGCCUGUACUCCGGCAAGGAGAUCAACCUGGUGCGGCUGAACGAGAAGGGCUACGUGGAG |
| | | AUCGACCACGCCCUGCCCUUCUCCCGGACCUGGGACGACUCCUUCAACAACAAGGUGCUGGUGCUGGGCUCCGAGAACCAGAACAAGGGCA |
| | | ACCAGACCCCCUACGAGUACUUCAACGGCAAGGACAACUCCCGGGAGUGGCAGGAGUUCAAGGCCCGGGUGGAGACCUCCCGGUUCCCCCG |
| | | GUCCAAGAAGCAGCGGAUCCUGCUGCAGAAGUUCGACGAGGACGGCUUCAAGGAGUGCAACCUGAACGACACCCGGUACGUGAACCGCUUC |
| | | CUGUGCCAGUUCGUGGCCGACCACAUCCUGCUGACCGGCAAGGGCAAGCGGCGGGUGUUCGCCUCCAACGGCCAGAUCACCAACCUGCUGC |
| | | GGGGCUUCUGGGGCCUGCGGAAGGUGCGGGCCGAGAACGACCGGCACCACGCCCUGGACGCCGUGGUGGUGGCCUGCUCCACCGUGGCCAU |
| | | GCAGCAGAAGAUCACCCGGUUCGUGCGGUACAAGGAGAUGAACGCCUUCGACGGCAAGACCAUCGACAAGGAGACCGGCAAGGUGCUGCAC |
| | | CAGAAGACCCACUUCCCCCAGCCCUGGGAGUUCUUCGCCCAGGAGGUGAUGAUCCGGGUGUUCGGCAAGCCCGACGGCAAGCCCGAGUUCG |
| | | AGGAGGCCGACACCCCCGAGAAGCUGCGGACCCUGCUGGCCGAGAAGCUGUCCUCCCGGCCCGAGGCCGUGCACGAGUACGUGACCCCCCU |
| | | GUUCGUGUCCCGGGCCCCCAACCGGAAGAUGUCCGGCGCCCACAAGGACACCCUGCGGUCCGCCAAGCGGUUCGUGAAGCACAACGAGAAG |
| | | AUCUCCGUGAAGCGGGUGUGGCUGACCGAGAUCAAGCUGGCCGACCUGGAGAACAUGGUGAACUACAAGAACGGCCGGGAGAUCGAGCUGU |
| | | ACGAGGCCCUGAAGGCCCGGCUGGAGGCCUACGGCGGCAACGCCAAGCAGGCCUUCGACCCCAAGGACAACCCCUUCUACAAGAAGGGCGG |
| | | CCAGCUGGUGAAGGCCGUGCGGGUGGAGAAGACCCAGGAGUCCGGCGUGCUGCUGAACAAGAAGAACGCCUACACCAUCGCCGACAACGGC |
| | | GACAUGGUGCGGGUGGACGUGUUCUGCAAGGUGGACAAGAAGGGCAAGAACCAGUACUUCAUCGUGCCCAUCUACGCCUGGCAGGUGGCCG |
| | | AGAACAUCCUGCCCGACAUCGACUGCAAGGGCUACCGGAUCGACGACUCCUACACCUUCUGCUUCUCCCUGCACAAGUACGACCUGAUCGC |
| | | CUUCCAGAAGGACGAGAAGUCCAAGGUGGAGUUCGCCUACUACAUCAACUGCGACUCCUCCAACGGCCGGUUCUACCUGGCCUGGCACGAC |
| | | AAGGGCUCCAAGGAGCAGCAGUUCCGGAUCUCCACCCAGAACCUGGUGCUGAUCCAGAAGUACCAGGUGAACGAGCUGGGCAAGGAGAUCC |
| | | GGCCCUGCCGGCUGAAGAAGCGGCCCCCCGUGCGGUCCGGAAAGCGGACCGCCGACGGCUCCGGAGGAGGAAGCCCGAAGAAGAAGAGAAA |
| | | GGUCUAG |
| 92 | Cas9- | MDKKYSIGLDIGTNSVGWAVITDEYKVPSKKFKVLGNTDRHSIKKNLIGALLFDSGETAEATRLKRTARRRYTRRKNRICYLQEIFSNEMA |
| | Cas9 | KVDDSFFHRLEESFLVEEDKKHERHPIFGNIVDEVAYHEKYPTIYHLRKKLVDSTDKADLRLIYLALAHMIKFRGHFLIEGDLNPDNSDVD |
| | fusion- | KLFIQLVQTYNQLFEENPINASGVDAKAILSARLSKSRRLENLIAQLPGEKKNGLFGNLIALSLGLTPNFKSNFDLAEDAKLQLSKDTYDD |
| | 81 | DLDNLLAQIGDQYADLFLAAKNLSDAILLSDILRVNTEITKAPLSASMIKRYDEHHQDLTLLKALVRQQLPEKYKEIFFDQSKNGYAGYID |
| | amino | GGASQEEFYKFIKPILEKMDGTEELLVKLNREDLLRKQRTFDNGSIPHQIHLGELHAILRRQEDFYPFLKDNREKIEKILTFRIPYYVGPL |
| | acid | ARGNSRFAWMTRKSEETITPWNFEEVVDKGASAQSFIERMTGGSSGQGDSLHEHIANLAGSPAIKKGILQTVKVVDELVKVMGRHKPENIV |
| | residual | IEMARENQTTQKGQKNSRERMKRIEEGIKELGSQILKEHPVENTQLQNEKLYLYYLQNGRDMYVDQELDINRLSDYDVDHIVPQSFLKDDS |
| | linker | IDNKVLTRSDKNRGKSDNVPSEEVVKKMKNYWRQLLNAKLITQRKFDNLTKAERGGLSELDKAGFIKRQLVETRQITKHVAQILDSRMNTK |
| | with | YDENDKLIREVKVITLKSKLVSDFRKDFQFYKVREINNYHHAHDAYLNAVVGTALIKKYPKLESEFVYGDYKVYDVRKMIAKSEQEIGKAT |
| | SpyCas9 | AKYFFYSNIMNFFKTEITLANGEIRKRPLIETNGETGEIVWDKGRDFATVRKVLSMPQVNIVKKTEVQTGGFSKESILPKRNSDKLIARKK |
| | without | DWDPKKYGGFDSPTVAYSVLVVAKVEKGKSKKLKSVKELLGITIMERSSFEKNPIDFLEAKGYKEVKKDLIIKLPKYSLFELENGRKRMLA |
| | Rec3 | SAGELQKGNELALPSKYVNFLYLASHYEKLKGSPEDNEQKQLFVEQHKHYLDEIIEQISEFSKRVILADANLDKVLSAYNKHRDKPIREQA |
| | domain | ENIIHLFTLTNLGAPAAFKYFDTTIDKKRYTSTKEVLDATLIHQSITGLYETRIDLSQLGGDGAPESATESGGTSTESEGSAGTSTESEGS |
| | (mRNA- | AGSAGSTSTEEGTSTESEGSAGTSTESEGSAGTSESATESGGTSTESEGSSSGAAFKPNPINYILGLDIGIASVGWAMVEIDEEENPIRLI |
| | W) | DLGVRVFERAEVPKTGDSLAMARRLARSVRRLTRRRAHRLLRARRLLKREGVLQAADFDENGLIKSLPNTPWQLRAAALDRKLTPLEWSAV |
| | amino | LLHLIKHRGYLSQRKNEGETADKELGALLKGVANNAHALQTGDFRTPAELALNKFEKESGHIRNQRGDYSHTFSRKDLQAELILLFEKQKE |
| | acid | FGNPHVSGGLKEGIETLLMTQRPALSGDAVQKMLGHCTFEPAEPKAAKNTYTAERFIWLTKLNNLRILEQGSERPLTDTERATLMDEPYRK |
| | sequence | SKLTYAQARKLLGLEDTAFFKGLRYGKDNAEASTLMEMKAYHAISRALEKEGLKDKKSPLNLSSELQDEIGTAFSLFKTDEDITGRLKDRV |
| | | QPEILEALLKHISFDKFVQISLKALRRIVPLMEQGKRYDEACAEIYGDHYGKKNTEEKIYLPPIPADEIRNPVVLRALSQARKVINGVVRR |
| | | YGSPARIHIETAREVGKSFKDRKEIEKRQEENRKDREKAAAKFREYFPNFVGEPKSKDILKLRLYEQQHGKCLYSGKEINLVRLNEKGYVE |
| | | IDHALPFSRTWDDSFNNKVLVLGSENQNKGNQTPYEYFNGKDNSREWQEFKARVETSRFPRSKKQRILLQKFDEDGFKECNLNDTRYVNRF |
| | | LCQFVADHILLTGKGKRRVFASNGQITNLLRGFWGLRKVRAENDRHHALDAVVVACSTVAMQQKITRFVRYKEMNAFDGKTIDKETGKVLH |
| | | QKTHFPQPWEFFAQEVMIRVFGKPDGKPEFEEADTPEKLRTLLAEKLSSRPEAVHEYVTPLFVSRAPNRKMSGAHKDTLRSAKRFVKHNEK |
| | | ISVKRVWLTEIKLADLENMVNYKNGREIELYEALKARLEAYGGNAKQAFDPKDNPFYKKGGQLVKAVRVEKTQESGVLLNKKNAYTIADNG |
| | | DMVRVDVFCKVDKKGKNQYFIVPIYAWQVAENILPDIDCKGYRIDDSYTFCFSLHKYDLIAFQKDEKSKVEFAYYINCDSSNGRFYLAWHD |
| | | KGSKEQQFRISTQNLVLIQKYQVNELGKEIRPCRLKKRPPVRSGKRTADGSGGGSPKKKRKV* |
| 93 | SpyCas9 | GGGUCCCGCAGUCGGCGUCCAGCGGCUCUGCUUGUUCGUGUGUGUGUCGUUGCAGGCCUUAUUCGGAUCCGCCACCAUGGACAAGAAGUAC |
| | (mRNA | AGCAUCGGACUGGACAUCGGAACAAACAGCGUCGGAUGGGCAGUCAUCACAGACGAAUACAAGGUCCCGAGCAAGAAGUUCAAGGUCCUGG |
| | X)- | GAAACACAGACAGACACAGCAUCAAGAAGAACCUGAUCGGAGCACUGCUGUUCGACAGCGGAGAAACAGCAGAAGCAACAAGACUGAAGAG |
| | mRNA | AACAGCAAGAAGAAGAUACACAAGAAGAAAGAACAGAAUCUGCUACCUGCAGGAAAUCUUCAGCAACGAAAUGGCAAAGGUCGACGACAGC |
| | sequence | UUCUUCCACAGACUGGAAGAAAGCUUCCUGGUCGAAGAAGACAAGAAGCACGAAAGACACCCGAUCUUCGGAAACAUCGUCGACGAAGUCG |
| | | CAUACCACGAAAAGUACCCGACAAUCUACCACCUGAGAAAGAAGCUGGUCGACAGCACAGACAAGGCAGACCUGAGACUGAUCUACCUGGC |
| | | ACUGGCACACAUGAUCAAGUUCAGAGGACACUUCCUGAUCGAAGGAGACCUGAACCCGGACAACAGCGACGUCGACAAGCUGUUCAUCCAG |
| | | CUGGUCCAGACAUACAACCAGCUGUUCGAAGAAAACCCGAUCAACGCAAGCGGAGUCGACGCAAAGGCAAUCCUGAGCGCAAGACUGAGCA |
| | | AGAGCAGAAGACUGGAAAACCUGAUCGCACAGCUGCCGGGAGAAAAGAAGAACGGACUGUUCGGAAACCUGAUCGCACUGAGCCUGGGACU |
| | | GACACCGAACUUCAAGAGCAACUUCGACCUGGCAGAAGACGCAAAGCUGCAGCUGAGCAAGGACACAUACGACGACGACCUGGACAACCUG |
| | | CUGGCACAGAUCGGAGACCAGUACGCAGACCUGUUCCUGGCAGCAAAGAACCUGAGCGACGCAAUCCUGCUGAGCGACAUCCUGAGAGUCA |
| | | ACACAGAAAUCACAAAGGCACCGCUGAGCGCAAGCAUGAUCAAGAGAUACGACGAACACCACCAGGACCUGACACUGCUGAAGGCACUGGU |
| | | CAGACAGCAGCUGCCGGAAAAGUACAAGGAAAUCUUCUUCGACCAGAGCAAGAACGGAUACGCAGGAUACAUCGACGGAGGAGCAAGCCAG |
| | | GAAGAAUUCUACAAGUUCAUCAAGCCGAUCCUGGAAAAGAUGGACGGAACAGAAGAACUGCUGGUCAAGCUGAACAGAGAAGACCUGCUGA |
| | | GAAAGCAGAGAACAUUCGACAACGGAAGCAUCCCGCACCAGAUCCACCUGGGAGAACUGCACGCAAUCCUGAGAAGACAGGAAGACUUCUA |
| | | CCCGUUCCUGAAGGACAACAGAGAAAAGAUCGAAAAGAUCCUGACAUUCAGAAUCCCGUACUACGUCGGACCGCUGGCAAGAGGAAACAGC |
| | | AGAUUCGCAUGGAUGACAAGAAAGAGCGAAGAAACAAUCACACCGUGGAACUUCGAAGAAGUCGUCGACAAGGGAGCAAGCGCACAGAGCU |
| | | UCAUCGAAAGAAUGACAAACUUCGACAAGAACCUGCCGAACGAAAAGGUCCUGCCGAAGCACAGCCUGCUGUACGAAUACUUCACAGUCUA |
| | | CAACGAACUGACAAAGGUCAAGUACGUCACAGAAGGAAUGAGAAAGCCGGCAUUCCUGAGCGGAGAACAGAAGAAGGCAAUCGUCGACCUG |
| | | CUGUUCAAGACAAACAGAAAGGUCACAGUCAAGCAGCUGAAGGAAGACUACUUCAAGAAGAUCGAAUGCUUCGACAGCGUCGAAAUCAGCG |
| | | GAGUCGAAGACAGAUUCAACGCAAGCCUGGGAACAUACCACGACCUGCUGAAGAUCAUCAAGGACAAGGACUUCCUGGACAACGAAGAAAA |
| | | CGAAGACAUCCUGGAAGACAUCGUCCUGACACUGACACUGUUCGAAGACAGAGAAAUGAUCGAAGAAAGACUGAAGACAUACGCACACCUG |
| | | UUCGACGACAAGGUCAUGAAGCAGCUGAAGAGAAGAAGAUACACAGGAUGGGGAAGACUGAGCAGAAAGCUGAUCAACGGAAUCAGAGACA |
| | | AGCAGAGCGGAAAGACAAUCCUGGACUUCCUGAAGAGCGACGGAUUCGCAAACAGAAACUUCAUGCAGCUGAUCCACGACGACAGCCUGAC |
| | | AUUCAAGGAAGACAUCCAGAAGGCACAGGUCAGCGGACAGGGAGACAGCCUGCACGAACACAUCGCAAACCUGGCAGGAAGCCCGGCAAUC |
| | | AAGAAGGGAAUCCUGCAGACAGUCAAGGUCGUCGACGAACUGGUCAAGGUCAUGGGAAGACACAAGCCGGAAAACAUCGUCAUCGAAAUGG |
| | | CAAGAGAAAACCAGACAACACAGAAGGGACAGAAGAACAGCAGAGAAAGAAUGAAGAGAAUCGAAGAAGGAAUCAAGGAACUGGGAAGCCA |
| | | GAUCCUGAAGGAACACCCGGUCGAAAACACACAGCUGCAGAACGAAAAGCUGUACCUGUACUACCUGCAGAACGGAAGAGACAUGUACGUC |
| | | GACCAGGAACUGGACAUCAACAGACUGAGCGACUACGACGUCGACCACAUCGUCCCGCAGAGCUUCCUGAAGGACGACAGCAUCGACAACA |
| | | AGGUCCUGACAAGAAGCGACAAGAACAGAGGAAAGAGCGACAACGUCCCGAGCGAAGAAGUCGUCAAGAAGAUGAAGAACUACUGGAGACA |
| | | GCUGCUGAACGCAAAGCUGAUCACACAGAGAAAGUUCGACAACCUGACAAAGGCAGAGAGAGGAGGACUGAGCGAACUGGACAAGGCAGGA |
| | | UUCAUCAAGAGACAGCUGGUCGAAACAAGACAGAUCACAAAGCACGUCGCACAGAUCCUGGACAGCAGAAUGAACACAAAGUACGACGAAA |
| | | ACGACAAGCUGAUCAGAGAAGUCAAGGUCAUCACACUGAAGAGCAAGCUGGUCAGCGACUUCAGAAAGGACUUCCAGUUCUACAAGGUCAG |
| | | AGAAAUCAACAACUACCACCACGCACACGACGCAUACCUGAACGCAGUCGUCGGAACAGCACUGAUCAAGAAGUACCCGAAGCUGGAAAGC |
| | | GAAUUCGUCUACGGAGACUACAAGGUCUACGACGUCAGAAAGAUGAUCGCAAAGAGCGAACAGGAAAUCGGAAAGGCAACAGCAAAGUACU |
| | | UCUUCUACAGCAACAUCAUGAACUUCUUCAAGACAGAAAUCACACUGGCAAACGGAGAAAUCAGAAAGAGACCGCUGAUCGAAACAAACGG |
| | | AGAAACAGGAGAAAUCGUCUGGGACAAGGGAAGAGACUUCGCAACAGUCAGAAAGGUCCUGAGCAUGCCGCAGGUCAACAUCGUCAAGAAG |
| | | ACAGAAGUCCAGACAGGAGGAUUCAGCAAGGAAAGCAUCCUGCCGAAGAGAAACAGCGACAAGCUGAUCGCAAGAAAGAAGGACUGGGACC |
| | | CGAAGAAGUACGGAGGAUUCGACAGCCCGACAGUCGCAUACAGCGUCCUGGUCGUCGCAAAGGUCGAAAAGGGAAAGAGCAAGAAGCUGAA |
| | | GAGCGUCAAGGAACUGCUGGGAAUCACAAUCAUGGAAAGAAGCAGCUUCGAAAAGAACCCGAUCGACUUCCUGGAAGCAAAGGGAUACAAG |
| | | GAAGUCAAGAAGGACCUGAUCAUCAAGCUGCCGAAGUACAGCCUGUUCGAACUGGAAAACGGAAGAAAGAGAAUGCUGGCAAGCGCAGGAG |
| | | AACUGCAGAAGGGAAACGAACUGGCACUGCCGAGCAAGUACGUCAACUUCCUGUACCUGGCAAGCCACUACGAAAAGCUGAAGGGAAGCCC |
| | | GGAAGACAACGAACAGAAGCAGCUGUUCGUCGAACAGCACAAGCACUACCUGGACGAAAUCAUCGAACAGAUCAGCGAAUUCAGCAAGAGA |
| | | GUCAUCCUGGCAGACGCAAACCUGGACAAGGUCCUGAGCGCAUACAACAAGCACAGAGACAAGCCGAUCAGAGAACAGGCAGAAAACAUCA |
| | | UCCACCUGUUCACACUGACAAACCUGGGAGCACCGGCAGCAUUCAAGUACUUCGACACAACAAUCGACAGAAAGAGAUACACAAGCACAAA |
| | | GGAAGUCCUGGACGCAACACUGAUCCACCAGAGCAUCACAGGACUGUACGAAACAAGAAUCGACCUGAGCCAGCUGGGAGGAGACGGAGGA |
| | | GGAAGCCCGAAGAAGAAGAGAAAGGUCUAGCUAGCCAUCACAUUUAAAAGCAUCUCAGCCUACCAUGAGAAUAAGAGAAAGAAAAUGAAGA |
| | | UCAAUAGCUUAUUCAUCUCUUUUUCUUUUUCGUUGGUGUAAAGCCAACACCCUGUCUAAAAAACAUAAAUUUCUUUAAUCAUUUUGCCUCU |
| | | UUUCUCUGUGCUUCAAUUAAUAAAAAAUGGAAAGAACCUCGAGAAAAAAAAAAAAAAAAAAAAAAAAAAAAAAAAAAAAAAAAAAAAAAAA |
| | | AAAAAAAAAAAAAAAAAAAAAAAAAAAAAAAAAAAAAAAAAAAAAAAAAAAAUCUAG |
| 94 | SpyCas9 | AUGGACAAGAAGUACAGCAUCGGACUGGACAUCGGAACAAACAGCGUCGGAUGGGCAGUCAUCACAGACGAAUACAAGGUCCCGAGCAAGA |
| | (mRNA | AGUUCAAGGUCCUGGGAAACACAGACAGACACAGCAUCAAGAAGAACCUGAUCGGAGCACUGCUGUUCGACAGCGGAGAAACAGCAGAAGC |
| | X)- | AACAAGACUGAAGAGAACAGCAAGAAGAAGAUACACAAGAAGAAAGAACAGAAUCUGCUACCUGCAGGAAAUCUUCAGCAACGAAAUGGCA |
| | ORF | AAGGUCGACGACAGCUUCUUCCACAGACUGGAAGAAAGCUUCCUGGUCGAAGAAGACAAGAAGCACGAAAGACACCCGAUCUUCGGAAACA |
| | sequence | UCGUCGACGAAGUCGCAUACCACGAAAAGUACCCGACAAUCUACCACCUGAGAAAGAAGCUGGUCGACAGCACAGACAAGGCAGACCUGAG |
| | | ACUGAUCUACCUGGCACUGGCACACAUGAUCAAGUUCAGAGGACACUUCCUGAUCGAAGGAGACCUGAACCCGGACAACAGCGACGUCGAC |
| | | AAGCUGUUCAUCCAGCUGGUCCAGACAUACAACCAGCUGUUCGAAGAAAACCCGAUCAACGCAAGCGGAGUCGACGCAAAGGCAAUCCUGA |
| | | GCGCAAGACUGAGCAAGAGCAGAAGACUGGAAAACCUGAUCGCACAGCUGCCGGGAGAAAAGAAGAACGGACUGUUCGGAAACCUGAUCGC |
| | | ACUGAGCCUGGGACUGACACCGAACUUCAAGAGCAACUUCGACCUGGCAGAAGACGCAAAGCUGCAGCUGAGCAAGGACACAUACGACGAC |
| | | GACCUGGACAACCUGCUGGCACAGAUCGGAGACCAGUACGCAGACCUGUUCCUGGCAGCAAAGAACCUGAGCGACGCAAUCCUGCUGAGCG |
| | | ACAUCCUGAGAGUCAACACAGAAAUCACAAAGGCACCGCUGAGCGCAAGCAUGAUCAAGAGAUACGACGAACACCACCAGGACCUGACACU |
| | | GCUGAAGGCACUGGUCAGACAGCAGCUGCCGGAAAAGUACAAGGAAAUCUUCUUCGACCAGAGCAAGAACGGAUACGCAGGAUACAUCGAC |
| | | GGAGGAGCAAGCCAGGAAGAAUUCUACAAGUUCAUCAAGCCGAUCCUGGAAAAGAUGGACGGAACAGAAGAACUGCUGGUCAAGCUGAACA |
| | | GAGAAGACCUGCUGAGAAAGCAGAGAACAUUCGACAACGGAAGCAUCCCGCACCAGAUCCACCUGGGAGAACUGCACGCAAUCCUGAGAAG |
| | | ACAGGAAGACUUCUACCCGUUCCUGAAGGACAACAGAGAAAAGAUCGAAAAGAUCCUGACAUUCAGAAUCCCGUACUACGUCGGACCGCUG |
| | | GCAAGAGGAAACAGCAGAUUCGCAUGGAUGACAAGAAAGAGCGAAGAAACAAUCACACCGUGGAACUUCGAAGAAGUCGUCGACAAGGGAG |
| | | CAAGCGCACAGAGCUUCAUCGAAAGAAUGACAAACUUCGACAAGAACCUGCCGAACGAAAAGGUCCUGCCGAAGCACAGCCUGCUGUACGA |
| | | AUACUUCACAGUCUACAACGAACUGACAAAGGUCAAGUACGUCACAGAAGGAAUGAGAAAGCCGGCAUUCCUGAGCGGAGAACAGAAGAAG |
| | | GCAAUCGUCGACCUGCUGUUCAAGACAAACAGAAAGGUCACAGUCAAGCAGCUGAAGGAAGACUACUUCAAGAAGAUCGAAUGCUUCGACA |
| | | GCGUCGAAAUCAGCGGAGUCGAAGACAGAUUCAACGCAAGCCUGGGAACAUACCACGACCUGCUGAAGAUCAUCAAGGACAAGGACUUCCU |
| | | GGACAACGAAGAAAACGAAGACAUCCUGGAAGACAUCGUCCUGACACUGACACUGUUCGAAGACAGAGAAAUGAUCGAAGAAAGACUGAAG |
| | | ACAUACGCACACCUGUUCGACGACAAGGUCAUGAAGCAGCUGAAGAGAAGAAGAUACACAGGAUGGGGAAGACUGAGCAGAAAGCUGAUCA |
| | | ACGGAAUCAGAGACAAGCAGAGCGGAAAGACAAUCCUGGACUUCCUGAAGAGCGACGGAUUCGCAAACAGAAACUUCAUGCAGCUGAUCCA |
| | | CGACGACAGCCUGACAUUCAAGGAAGACAUCCAGAAGGCACAGGUCAGCGGACAGGGAGACAGCCUGCACGAACACAUCGCAAACCUGGCA |
| | | GGAAGCCCGGCAAUCAAGAAGGGAAUCCUGCAGACAGUCAAGGUCGUCGACGAACUGGUCAAGGUCAUGGGAAGACACAAGCCGGAAAACA |
| | | UCGUCAUCGAAAUGGCAAGAGAAAACCAGACAACACAGAAGGGACAGAAGAACAGCAGAGAAAGAAUGAAGAGAAUCGAAGAAGGAAUCAA |
| | | GGAACUGGGAAGCCAGAUCCUGAAGGAACACCCGGUCGAAAACACACAGCUGCAGAACGAAAAGCUGUACCUGUACUACCUGCAGAACGGA |
| | | AGAGACAUGUACGUCGACCAGGAACUGGACAUCAACAGACUGAGCGACUACGACGUCGACCACAUCGUCCCGCAGAGCUUCCUGAAGGACG |
| | | ACAGCAUCGACAACAAGGUCCUGACAAGAAGCGACAAGAACAGAGGAAAGAGCGACAACGUCCCGAGCGAAGAAGUCGUCAAGAAGAUGAA |
| | | GAACUACUGGAGACAGCUGCUGAACGCAAAGCUGAUCACACAGAGAAAGUUCGACAACCUGACAAAGGCAGAGAGAGGAGGACUGAGCGAA |
| | | CUGGACAAGGCAGGAUUCAUCAAGAGACAGCUGGUCGAAACAAGACAGAUCACAAAGCACGUCGCACAGAUCCUGGACAGCAGAAUGAACA |
| | | CAAAGUACGACGAAAACGACAAGCUGAUCAGAGAAGUCAAGGUCAUCACACUGAAGAGCAAGCUGGUCAGCGACUUCAGAAAGGACUUCCA |
| | | GUUCUACAAGGUCAGAGAAAUCAACAACUACCACCACGCACACGACGCAUACCUGAACGCAGUCGUCGGAACAGCACUGAUCAAGAAGUAC |
| | | CCGAAGCUGGAAAGCGAAUUCGUCUACGGAGACUACAAGGUCUACGACGUCAGAAAGAUGAUCGCAAAGAGCGAACAGGAAAUCGGAAAGG |
| | | CAACAGCAAAGUACUUCUUCUACAGCAACAUCAUGAACUUCUUCAAGACAGAAAUCACACUGGCAAACGGAGAAAUCAGAAAGAGACCGCU |
| | | GAUCGAAACAAACGGAGAAACAGGAGAAAUCGUCUGGGACAAGGGAAGAGACUUCGCAACAGUCAGAAAGGUCCUGAGCAUGCCGCAGGUC |
| | | AACAUCGUCAAGAAGACAGAAGUCCAGACAGGAGGAUUCAGCAAGGAAAGCAUCCUGCCGAAGAGAAACAGCGACAAGCUGAUCGCAAGAA |
| | | AGAAGGACUGGGACCCGAAGAAGUACGGAGGAUUCGACAGCCCGACAGUCGCAUACAGCGUCCUGGUCGUCGCAAAGGUCGAAAAGGGAAA |
| | | GAGCAAGAAGCUGAAGAGCGUCAAGGAACUGCUGGGAAUCACAAUCAUGGAAAGAAGCAGCUUCGAAAAGAACCCGAUCGACUUCCUGGAA |
| | | GCAAAGGGAUACAAGGAAGUCAAGAAGGACCUGAUCAUCAAGCUGCCGAAGUACAGCCUGUUCGAACUGGAAAACGGAAGAAAGAGAAUGC |
| | | UGGCAAGCGCAGGAGAACUGCAGAAGGGAAACGAACUGGCACUGCCGAGCAAGUACGUCAACUUCCUGUACCUGGCAAGCCACUACGAAAA |
| | | GCUGAAGGGAAGCCCGGAAGACAACGAACAGAAGCAGCUGUUCGUCGAACAGCACAAGCACUACCUGGACGAAAUCAUCGAACAGAUCAGC |
| | | GAAUUCAGCAAGAGAGUCAUCCUGGCAGACGCAAACCUGGACAAGGUCCUGAGCGCAUACAACAAGCACAGAGACAAGCCGAUCAGAGAAC |
| | | AGGCAGAAAACAUCAUCCACCUGUUCACACUGACAAACCUGGGAGCACCGGCAGCAUUCAAGUACUUCGACACAACAAUCGACAGAAAGAG |
| | | AUACACAAGCACAAAGGAAGUCCUGGACGCAACACUGAUCCACCAGAGCAUCACAGGACUGUACGAAACAAGAAUCGACCUGAGCCAGCUG |
| | | GGAGGAGACGGAGGAGGAAGCCCGAAGAAGAAGAGAAAGGUCUAG |
| 95 | SpyCas9 | MDKKYSIGLDIGTNSVGWAVITDEYKVPSKKFKVLGNTDRHSIKKNLIGALLFDSGETAEATRLKRTARRRYTRRKNRICYLQEIFSNEMA |
| | (mRNA | KVDDSFFHRLEESFLVEEDKKHERHPIFGNIVDEVAYHEKYPTIYHLRKKLVDSTDKADLRLIYLALAHMIKFRGHFLIEGDLNPDNSDVD |
| | X)- | KLFIQLVQTYNQLFEENPINASGVDAKAILSARLSKSRRLENLIAQLPGEKKNGLFGNLIALSLGLTPNFKSNFDLAEDAKLQLSKDTYDD |
| | amino | DLDNLLAQIGDQYADLFLAAKNLSDAILLSDILRVNTEITKAPLSASMIKRYDEHHQDLTLLKALVRQQLPEKYKEIFFDQSKNGYAGYID |
| | acid | GGASQEEFYKFIKPILEKMDGTEELLVKLNREDLLRKQRTFDNGSIPHQIHLGELHAILRRQEDFYPFLKDNREKIEKILTFRIPYYVGPL |
| | sequence | ARGNSRFAWMTRKSEETITPWNFEEVVDKGASAQSFIERMTNFDKNLPNEKVLPKHSLLYEYFTVYNELTKVKYVTEGMRKPAFLSGEQKK |
| | | AIVDLLFKTNRKVTVKQLKEDYFKKIECFDSVEISGVEDRFNASLGTYHDLLKIIKDKDFLDNEENEDILEDIVLTLTLFEDREMIEERLK |
| | | TYAHLFDDKVMKQLKRRRYTGWGRLSRKLINGIRDKQSGKTILDFLKSDGFANRNFMQLIHDDSLTFKEDIQKAQVSGQGDSLHEHIANLA |
| | | GSPAIKKGILQTVKVVDELVKVMGRHKPENIVIEMARENQTTQKGQKNSRERMKRIEEGIKELGSQILKEHPVENTQLQNEKLYLYYLQNG |
| | | RDMYVDQELDINRLSDYDVDHIVPQSFLKDDSIDNKVLTRSDKNRGKSDNVPSEEVVKKMKNYWRQLLNAKLITQRKFDNLTKAERGGLSE |
| | | LDKAGFIKRQLVETRQITKHVAQILDSRMNTKYDENDKLIREVKVITLKSKLVSDFRKDFQFYKVREINNYHHAHDAYLNAVVGTALIKKY |
| | | PKLESEFVYGDYKVYDVRKMIAKSEQEIGKATAKYFFYSNIMNFFKTEITLANGEIRKRPLIETNGETGEIVWDKGRDFATVRKVLSMPQV |
| | | NIVKKTEVQTGGFSKESILPKRNSDKLIARKKDWDPKKYGGFDSPTVAYSVLVVAKVEKGKSKKLKSVKELLGITIMERSSFEKNPIDFLE |
| | | AKGYKEVKKDLIIKLPKYSLFELENGRKRMLASAGELQKGNELALPSKYVNFLYLASHYEKLKGSPEDNEQKQLFVEQHKHYLDEIIEQIS |
| | | EFSKRVILADANLDKVLSAYNKHRDKPIREQAENIIHLFTLTNLGAPAAFKYFDTTIDRKRYTSTKEVLDATLIHQSITGLYETRIDLSQL |
| | | GGDGGGSPKKKRKV* |
| 96 | SpyCas9- | AUGGACAAGAAGUACAGCAUCGGACUGGACAUCGGAACAAACAGCGUCGGAUGGGCAGUCAUCACAGACGAAUACAA |
| | Nme | GGUCCCGAGCAAGAAGUUCAAGGUCCUGGGAAACACAGACAGACACAGCAUCAAGAAGAACCUGAUCGGAGCACUGC |
| | cleavase | UGUUCGACAGCGGAGAAACAGCAGAAGCAACAAGACUGAAGAGAACAGCAAGAAGAAGAUACACAAGAAGAAAGAAC |
| | fusion | AGAAUCUGCUACCUGCAGGAAAUCUUCAGCAACGAAAUGGCAAAGGUCGACGACAGCUUCUUCCACAGACUGGAAGA |
| | ORF | AAGCUUCCUGGUCGAAGAAGACAAGAAGCACGAAAGACACCCGAUCUUCGGAAACAUCGUCGACGAAGUCGCAUACC |
| | | ACGAAAAGUACCCGACAAUCUACCACCUGAGAAAGAAGCUGGUCGACAGCACAGACAAGGCAGACCUGAGACUGAUC |
| | | UACCUGGCACUGGCACACAUGAUCAAGUUCAGAGGACACUUCCUGAUCGAAGGAGACCUGAACCCGGACAACAGCGAC |
| | | GUCGACAAGCUGUUCAUCCAGCUGGUCCAGACAUACAACCAGCUGUUCGAAGAAAACCCGAUCAACGCAAGCGGAGUC |
| | | GACGCAAAGGCAAUCCUGAGCGCAAGACUGAGCAAGAGCAGAAGACUGGAAAACCUGAUCGCACAGCUGCCGGGAGA |
| | | AAAGAAGAACGGACUGUUCGGAAACCUGAUCGCACUGAGCCUGGGACUGACACCGAACUUCAAGAGCAACUUCGACC |
| | | UGGCAGAAGACGCAAAGCUGCAGCUGAGCAAGGACACAUACGACGACGACCUGGACAACCUGCUGGCACAGAUCGGA |
| | | GACCAGUACGCAGACCUGUUCCUGGCAGCAAAGAACCUGAGCGACGCAAUCCUGCUGAGCGACAUCCUGAGAGUCAAC |
| | | ACAGAAAUCACAAAGGCACCGCUGAGCGCAAGCAUGAUCAAGAGAUACGACGAACACCACCAGGACCUGACACUGCUG |
| | | AAGGCACUGGUCAGACAGCAGCUGCCGGAAAAGUACAAGGAAAUCUUCUUCGACCAGAGCAAGAACGGAUACGCAGG |
| | | AUACAUCGACGGAGGAGCAAGCCAGGAAGAAUUCUACAAGUUCAUCAAGCCGAUCCUGGAAAAGAUGGACGGAACAG |
| | | AAGAACUGCUGGUCAAGCUGAACAGAGAAGACCUGCUGAGAAAGCAGAGAACAUUCGACAACGGAAGCAUCCCGCAC |
| | | CAGAUCCACCUGGGAGAACUGCACGCAAUCCUGAGAAGACAGGAAGACUUCUACCCGUUCCUGAAGGACAACAGAGA |
| | | AAAGAUCGAAAAGAUCCUGACAUUCAGAAUCCCGUACUACGUCGGACCGCUGGCAAGAGGAAACAGCAGAUUCGCAU |
| | | GGAUGACAAGAAAGAGCGAAGAAACAAUCACACCGUGGAACUUCGAAGAAGUCGUCGACAAGGGAGCAAGCGCACAG |
| | | AGCUUCAUCGAAAGAAUGACAAACUUCGACAAGAACCUGCCGAACGAAAAGGUCCUGCCGAAGCACAGCCUGCUGUAC |
| | | GAAUACUUCACAGUCUACAACGAACUGACAAAGGUCAAGUACGUCACAGAAGGAAUGAGAAAGCCGGCAUUCCUGAG |
| | | CGGAGAACAGAAGAAGGCAAUCGUCGACCUGCUGUUCAAGACAAACAGAAAGGUCACAGUCAAGCAGCUGAAGGAAG |
| | | ACUACUUCAAGAAGAUCGAAUGCUUCGACAGCGUCGAAAUCAGCGGAGUCGAAGACAGAUUCAACGCAAGCCUGGGA |
| | | ACAUACCACGACCUGCUGAAGAUCAUCAAGGACAAGGACUUCCUGGACAACGAAGAAAACGAAGACAUCCUGGAAGA |
| | | CAUCGUCCUGACACUGACACUGUUCGAAGACAGAGAAAUGAUCGAAGAAAGACUGAAGACAUACGCACACCUGUUCG |
| | | ACGACAAGGUCAUGAAGCAGCUGAAGAGAAGAAGAUACACAGGAUGGGGAAGACUGAGCAGAAAGCUGAUCAACGGA |
| | | AUCAGAGACAAGCAGAGCGGAAAGACAAUCCUGGACUUCCUGAAGAGCGACGGAUUCGCAAACAGAAACUUCAUGCA |
| | | GCUGAUCCACGACGACAGCCUGACAUUCAAGGAAGACAUCCAGAAGGCACAGGUCAGCGGACAGGGAGACAGCCUGCA |
| | | CGAACACAUCGCAAACCUGGCAGGAAGCCCGGCAAUCAAGAAGGGAAUCCUGCAGACAGUCAAGGUCGUCGACGAACU |
| | | GGUCAAGGUCAUGGGAAGACACAAGCCGGAAAACAUCGUCAUCGAAAUGGCAAGAGAAAACCAGACAACACAGAAGG |
| | | GACAGAAGAACAGCAGAGAAAGAAUGAAGAGAAUCGAAGAAGGAAUCAAGGAACUGGGAAGCCAGAUCCUGAAGGAA |
| | | CACCCGGUCGAAAACACACAGCUGCAGAACGAAAAGCUGUACCUGUACUACCUGCAGAACGGAAGAGACAUGUACGUC |
| | | GACCAGGAACUGGACAUCAACAGACUGAGCGACUACGACGUCGACCACAUCGUCCCGCAGAGCUUCCUGAAGGACGAC |
| | | AGCAUCGACAACAAGGUCCUGACAAGAAGCGACAAGAACAGAGGAAAGAGCGACAACGUCCCGAGCGAAGAAGUCGU |
| | | CAAGAAGAUGAAGAACUACUGGAGACAGCUGCUGAACGCAAAGCUGAUCACACAGAGAAAGUUCGACAACCUGACAA |
| | | AGGCAGAGAGAGGAGGACUGAGCGAACUGGACAAGGCAGGAUUCAUCAAGAGACAGCUGGUCGAAACAAGACAGAUC |
| | | ACAAAGCACGUCGCACAGAUCCUGGACAGCAGAAUGAACACAAAGUACGACGAAAACGACAAGCUGAUCAGAGAAGU |
| | | CAAGGUCAUCACACUGAAGAGCAAGCUGGUCAGCGACUUCAGAAAGGACUUCCAGUUCUACAAGGUCAGAGAAAUCA |
| | | ACAACUACCACCACGCACACGACGCAUACCUGAACGCAGUCGUCGGAACAGCACUGAUCAAGAAGUACCCGAAGCUGG |
| | | AAAGCGAAUUCGUCUACGGAGACUACAAGGUCUACGACGUCAGAAAGAUGAUCGCAAAGAGCGAACAGGAAAUCGGA |
| | | AAGGCAACAGCAAAGUACUUCUUCUACAGCAACAUCAUGAACUUCUUCAAGACAGAAAUCACACUGGCAAACGGAGA |
| | | AAUCAGAAAGAGACCGCUGAUCGAAACAAACGGAGAAACAGGAGAAAUCGUCUGGGACAAGGGAAGAGACUUCGCAA |
| | | CAGUCAGAAAGGUCCUGAGCAUGCCGCAGGUCAACAUCGUCAAGAAGACAGAAGUCCAGACAGGAGGAUUCAGCAAG |
| | | GAAAGCAUCCUGCCGAAGAGAAACAGCGACAAGCUGAUCGCAAGAAAGAAGGACUGGGACCCGAAGAAGUACGGAGG |
| | | AUUCGACAGCCCGACAGUCGCAUACAGCGUCCUGGUCGUCGCAAAGGUCGAAAAGGGAAAGAGCAAGAAGCUGAAGA |
| | | GCGUCAAGGAACUGCUGGGAAUCACAAUCAUGGAAAGAAGCAGCUUCGAAAAGAACCCGAUCGACUUCCUGGAAGCA |
| | | AAGGGAUACAAGGAAGUCAAGAAGGACCUGAUCAUCAAGCUGCCGAAGUACAGCCUGUUCGAACUGGAAAACGGAAG |
| | | AAAGAGAAUGCUGGCAAGCGCAGGAGAACUGCAGAAGGGAAACGAACUGGCACUGCCGAGCAAGUACGUCAACUUCC |
| | | UGUACCUGGCAAGCCACUACGAAAAGCUGAAGGGAAGCCCGGAAGACAACGAACAGAAGCAGCUGUUCGUCGAACAG |
| | | CACAAGCACUACCUGGACGAAAUCAUCGAACAGAUCAGCGAAUUCAGCAAGAGAGUCAUCCUGGCAGACGCAAACCUG |
| | | GACAAGGUCCUGAGCGCAUACAACAAGCACAGAGACAAGCCGAUCAGAGAACAGGCAGAAAACAUCAUCCACCUGUUC |
| | | ACACUGACAAACCUGGGAGCACCGGCAGCAUUCAAGUACUUCGACACAACAAUCGACAGAAAGAGAUACACAAGCACA |
| | | AAGGAAGUCCUGGACGCAACACUGAUCCACCAGAGCAUCACAGGACUGUACGAAACAAGAAUCGACCUGAGCCAGCUG |
| | | GGAGGAGACGGCGCGCCUGAGUCUGCUACAGAAAGUGGGGGAACCUCCACAGAGUCUGAAGGAAGUGCCGGCACUUC |
| | | AACCGAGAGCGAAGGGUCCGCUGGAUCUGCAGGCUCCACAUCUACUGAGGAAGGCACCAGUACAGAGUCAGAAGGCA |
| | | GCGCCGGAACUUCCACCGAGUCUGAAGGCAGUGCCGGGACAAGUGAAUCAGCUACUGAAAGCGGCGGGACAUCAACU |
| | | GAGAGCGAAGGAUCCAGUUCCGGAGCAGCAUUCAAGCCGAACUCGAUCAACUACAUCCUGGGACUGGACAUCGGAAU |
| | | CGCAUCGGUCGGAUGGGCAAUGGUCGAAAUCGACGAAGAAGAAAACCCGAUCAGACUGAUCGACCUGGGAGUCAGAG |
| | | UCUUCGAAAGAGCAGAAGUCCCGAAGACAGGAGACUCGCUGGCAAUGGCAAGAAGACUGGCAAGAUCGGUCAGAAGA |
| | | CUGACAAGAAGAAGAGCACACAGACUGCUGAGAACAAGAAGACUGCUGAAGAGAGAAGGAGUCCUGCAGGCAGCAAA |
| | | CUUCGACGAAAACGGACUGAUCAAGUCGCUGCCGAACACACCGUGGCAGCUGAGAGCAGCAGCACUGGACAGAAAGCU |
| | | GACACCGCUGGAAUGGUCGGCAGUCCUGCUGCACCUGAUCAAGCACAGAGGAUACCUGUCGCAGAGAAAGAACGAAG |
| | | GAGAAACAGCAGACAAGGAACUGGGAGCACUGCUGAAGGGAGUCGCAGGAAACGCACACGCACUGCAGACAGGAGAC |
| | | UUCAGAACACCGGCAGAACUGGCACUGAACAAGUUCGAAAAGGAAUCGGGACACAUCAGAAACCAGAGAUCGGACUA |
| | | CUCGCACACAUUCUCGAGAAAGGACCUGCAGGCAGAACUGAUCCUGCUGUUCGAAAAGCAGAAGGAAUUCGGAAACC |
| | | CGCACGUCUCGGGAGGACUGAAGGAAGGAAUCGAAACACUGCUGAUGACACAGAGACCGGCACUGUCGGGAGACGCA |
| | | GUCCAGAAGAUGCUGGGACACUGCACAUUCGAACCGGCAGAACCGAAGGCAGCAAAGAACACAUACACAGCAGAAAG |
| | | AUUCAUCUGGCUGACAAAGCUGAACAACCUGAGAAUCCUGGAACAGGGAUCGGAAAGACCGCUGACAGACACAGAAA |
| | | GAGCAACACUGAUGGACGAACCGUACAGAAAGUCGAAGCUGACAUACGCACAGGCAAGAAAGCUGCUGGGACUGGAA |
| | | GACACAGCAUUCUUCAAGGGACUGAGAUACGGAAAGGACAACGCAGAAGCAUCGACACUGAUGGAAAUGAAGGCAUA |
| | | CCACGCAAUCUCGAGAGCACUGGAAAAGGAAGGACUGAAGGACAAGAAGUCGCCGCUGAACCUGUCGCCGGAACUGC |
| | | AGGACGAAAUCGGAACAGCAUUCUCGCUGUUCAAGACAGACGAAGACAUCACAGGAAGACUGAAGGACAGAAUCCAG |
| | | CCGGAAAUCCUGGAAGCACUGCUGAAGCACAUCUCGUUCGACAAGUUCGUCCAGAUCUCGCUGAAGGCACUGAGAAG |
| | | AAUCGUCCCGCUGAUGGAACAGGGAAAGAGAUACGACGAAGCAUGCGCAGAAAUCUACGGAGACCACUACGGAAAGA |
| | | AGAACACAGAAGAAAAGAUCUACCUGCCGCCGAUCCCGGCAGACGAAAUCAGAAACCCGGUCGUCCUGAGAGCACUGU |
| | | CGCAGGCAAGAAAGGUCAUCAACGGAGUCGUCAGAAGAUACGGAUCGCCGGCAAGAAUCCACAUCGAAACAGCAAGA |
| | | GAAGUCGGAAAGUCGUUCAAGGACAGAAAGGAAAUCGAAAAGAGACAGGAAGAAAACAGAAAGGACAGAGAAAAGGC |
| | | AGCAGCAAAGUUCAGAGAAUACUUCCCGAACUUCGUCGGAGAACCGAAGUCGAAGGACAUCCUGAAGCUGAGACUGU |
| | | ACGAACAGCAGCACGGAAAGUGCCUGUACUCGGGAAAGGAAAUCAACCUGGGAAGACUGAACGAAAAGGGAUACGUC |
| | | GAAAUCGACCACGCACUGCCGUUCUCGAGAACAUGGGACGACUCGUUCAACAACAAGGUCCUGGUCCUGGGAUCGGAA |
| | | AACCAGAACAAGGGAAACCAGACACCGUACGAAUACUUCAACGGAAAGGACAACUCGAGAGAAUGGCAGGAAUUCAA |
| | | GGCAAGAGUCGAAACAUCGAGAUUCCCGAGAUCGAAGAAGCAGAGAAUCCUGCUGCAGAAGUUCGACGAAGACGGAU |
| | | UCAAGGAAAGAAACCUGAACGACACAAGAUACGUCAACAGAUUCCUGUGCCAGUUCGUCGCAGACAGAAUGAGACUG |
| | | ACAGGAAAGGGAAAGAAGAGAGUCUUCGCAUCGAACGGACAGAUCACAAACCUGCUGAGAGGAUUCUGGGGACUGAG |
| | | AAAGGUCAGAGCAGAAAACGACAGACACCACGCACUGGACGCAGUCGUCGUCGCAUGCUCGACAGUCGCAAUGCAGCA |
| | | GAAGAUCACAAGAUUCGUCAGAUACAAGGAAAUGAACGCAUUCGACGGAAAGACAAUCGACAAGGAAACAGGAGAAG |
| | | UCCUGCACCAGAAGACACACUUCCCGCAGCCGUGGGAAUUCUUCGCACAGGAAGUCAUGAUCAGAGUCUUCGGAAAGC |
| | | CGGACGGAAAGCCGGAAUUCGAAGAAGCAGACACACUGGAAAAGCUGAGAACACUGCUGGCAGAAAAGCUGUCGUCG |
| | | AGACCGGAAGCAGUCCACGAAUACGUCACACCGCUGUUCGUCUCGAGAGCACCGAACAGAAAGAUGUCGGGACAGGG |
| | | ACACAUGGAAACAGUCAAGUCGGCAAAGAGACUGGACGAAGGAGUCUCGGUCCUGAGAGUCCCGCUGACACAGCUGA |
| | | AGCUGAAGGACCUGGAAAAGAUGGUCAACAGAGAAAGAGAACCGAAGCUGUACGAAGCACUGAAGGCAAGACUGGAA |
| | | GCACACAAGGACGACCCGGCAAAGGCAUUCGCAGAACCGUUCUACAAGUACGACAAGGCAGGAAACAGAACACAGCAG |
| | | GUCAAGGCAGUCAGAGUCGAACAGGUCCAGAAGACAGGAGUCUGGGUCAGAAACCACAACGGAAUCGCAGACAACGC |
| | | AACAAUGGUCAGAGUAGACGUCUUCGAAAAGGGAGACAAGUACUACCUGGUCCCGAUCUACUCGUGGCAGGUCGCAA |
| | | AGGGAAUCCUGCCGGACAGAGCAGUCGUCCAGGGAAAGGACGAAGAAGACUGGCAGCUGAUCGACGACUCGUUCAAC |
| | | UUCAAGUUCUCGCUGCACCCGAACGACCUGGUCGAAGUCAUCACAAAGAAGGCAAGAAUGUUCGGAUACUUCGCAUC |
| | | GUGCCACAGAGGAACAGGAAACAUCAACAUCAGAAUCCACGACCUGGACCACAAGAUCGGAAAGAACGGAAUCCUGG |
| | | AAGGAAUCGGAGUCAAGACAGCACUGUCGUUCCAGAAGUACCAGAUCGACGAACUGGGAAAGGAAAUCAGACCGUGC |
| | | AGACUGAAGAAGAGACCGCCGGUCAGAGGGGGCAGCGGCGGGUCUAAGAGGACCGCCGAUGGGAGUGAGUUUGAAAG |
| | | CCCUAAAAAGAAAAGAAAAGUGGAAUGA |
| 97 | SpyCas9- | MDKKYSIGLDIGTNSVGWAVITDEYKVPSKKFKVLGNTDRHSIKKNLIGALLFDSGETAEATRLKRTARRRYTRRKNRICYLQEI |
| | Nme | FSNEMAKVDDSFFHRLEESFLVEEDKKHERHPIFGNIVDEVAYHEKYPTIYHLRKKLVDSTDKADLRLIYLALAHMIKFRGHFLI |
| | cleavase | EGDLNPDNSDVDKLFIQLVQTYNQLFEENPINASGVDAKAILSARLSKSRRLENLIAQLPGEKKNGLFGNLIALSLGLTPNFKSNF |
| | fusion | DLAEDAKLQLSKDTYDDDLDNLLAQIGDQYADLFLAAKNLSDAILLSDILRVNTEITKAPLSASMIKRYDEHHQDLTLLKALVR |
| | amino | QQLPEKYKEIFFDQSKNGYAGYIDGGASQEEFYKFIKPILEKMDGTEELLVKLNREDLLRKQRTFDNGSIPHQIHLGELHAILRRQ |
| | acid | EDFYPFLKDNREKIEKILTFRIPYYVGPLARGNSRFAWMTRKSEETITPWNFEEVVDKGASAQSFIERMTNFDKNLPNEKVLPKH |
| | sequence | SLLYEYFTVYNELTKVKYVTEGMRKPAFLSGEQKKAIVDLLFKTNRKVTVKQLKEDYFKKIECFDSVEISGVEDRFNASLGTYH |
| | | DLLKIIKDKDFLDNEENEDILEDIVLTLTLFEDREMIEERLKTYAHLFDDKVMKQLKRRRYTGWGRLSRKLINGIRDKQSGKTIL |
| | | DFLKSDGFANRNFMQLIHDDSLTFKEDIQKAQVSGQGDSLHEHIANLAGSPAIKKGILQTVKVVDELVKVMGRHKPENIVIEMA |
| | | RENQTTQKGQKNSRERMKRIEEGIKELGSQILKEHPVENTQLQNEKLYLYYLQNGRDMYVDQELDINRLSDYDVDHIVPQSFL |
| | | KDDSIDNKVLTRSDKNRGKSDNVPSEEVVKKMKNYWRQLLNAKLITQRKFDNLTKAERGGLSELDKAGFIKRQLVETRQITKH |
| | | VAQILDSRMNTKYDENDKLIREVKVITLKSKLVSDFRKDFQFYKVREINNYHHAHDAYLNAVVGTALIKKYPKLESEFVYGDY |
| | | KVYDVRKMIAKSEQEIGKATAKYFFYSNIMNFFKTEITLANGEIRKRPLIETNGETGEIVWDKGRDFATVRKVLSMPQVNIVKKT |
| | | EVQTGGFSKESILPKRNSDKLIARKKDWDPKKYGGFDSPTVAYSVLVVAKVEKGKSKKLKSVKELLGITIMERSSFEKNPIDFLE |
| | | AKGYKEVKKDLIIKLPKYSLFELENGRKRMLASAGELQKGNELALPSKYVNFLYLASHYEKLKGSPEDNEQKQLFVEQHKHYL |
| | | DEIIEQISEFSKRVILADANLDKVLSAYNKHRDKPIREQAENIIHLFTLTNLGAPAAFKYFDTTIDRKRYTSTKEVLDATLIHQSITG |
| | | LYETRIDLSQLGGDGAPESATESGGTSTESEGSAGTSTESEGSAGSAGSTSTEEGTSTESEGSAGTSTESEGSAGTSESATESGGTS |
| | | TESEGSSSGAAFKPNSINYILGLDIGIASVGWAMVEIDEEENPIRLIDLGVRVFERAEVPKTGDSLAMARRLARSVRRLTRRRAHR |
| | | LLRTRRLLKREGVLQAANFDENGLIKSLPNTPWQLRAAALDRKLTPLEWSAVLLHLIKHRGYLSQRKNEGETADKELGALLKG |
| | | VAGNAHALQTGDFRTPAELALNKFEKESGHIRNQRSDYSHTFSRKDLQAELILLFEKQKEFGNPHVSGGLKEGIETLLMTQRPA |
| | | LSGDAVQKMLGHCTFEPAEPKAAKNTYTAERFIWLTKLNNLRILEQGSERPLTDTERATLMDEPYRKSKLTYAQARKLLGLED |
| | | TAFFKGLRYGKDNAEASTLMEMKAYHAISRALEKEGLKDKKSPLNLSPELQDEIGTAFSLFKTDEDITGRLKDRIQPEILEALLK |
| | | HISFDKFVQISLKALRRIVPLMEQGKRYDEACAEIYGDHYGKKNTEEKIYLPPIPADEIRNPVVLRALSQARKVINGVVRRYGSP |
| | | ARIHIETAREVGKSFKDRKEIEKRQEENRKDREKAAAKFREYFPNFVGEPKSKDILKLRLYEQQHGKCLYSGKEINLGRLNEKG |
| | | YVEIDHALPFSRTWDDSFNNKVLVLGSENQNKGNQTPYEYFNGKDNSREWQEFKARVETSRFPRSKKQRILLQKFDEDGFKER |
| | | NLNDTRYVNRFLCQFVADRMRLTGKGKKRVFASNGQITNLLRGFWGLRKVRAENDRHHALDAVVVACSTVAMQQKITRFVR |
| | | YKEMNAFDGKTIDKETGEVLHQKTHFPQPWEFFAQEVMIRVFGKPDGKPEFEEADTLEKLRTLLAEKLSSRPEAVHEYVTPLFV |
| | | SRAPNRKMSGQGHMETVKSAKRLDEGVSVLRVPLTQLKLKDLEKMVNREREPKLYEALKARLEAHKDDPAKAFAEPFYKYD |
| | | KAGNRTQQVKAVRVEQVQKTGVWVRNHNGIADNATMVRVDVFEKGDKYYLVPIYSWQVAKGILPDRAVVQGKDEEDWQLI |
| | | DDSFNFKFSLHPNDLVEVITKKARMFGYFASCHRGTGNINIRIHDLDHKIGKNGILEGIGVKTALSFQKYQIDELGKEIRPCRLKK |
| | | RPPVRGGSGGSKRTADGSEFESPKKKRKVE* |
| 98 | Spy- | AUGGACAAGAAGUACAGCAUCGGACUGGACAUCGGAACAAACAGCGUCGGAUGGGCAGUCAUCACAGACGAAUACAAGGUCCCGAGCAAGA |
| | R1335S | AGUUCAAGGUCCUGGGAAACACAGACAGACACAGCAUCAAGAAGAACCUGAUCGGAGCACUGCUGUUCGACAGCGGAGAAACAGCAGAAGC |
| | Cas9- | AACAAGACUGAAGAGAACAGCAAGAAGAAGAUACACAAGAAGAAAGAACAGAAUCUGCUACCUGCAGGAAAUCUUCAGCAACGAAAUGGCA |
| | WT | AAGGUCGACGACAGCUUCUUCCACAGACUGGAAGAAAGCUUCCUGGUCGAAGAAGACAAGAAGCACGAAAGACACCCGAUCUUCGGAAACA |
| | NmeCas9 | UCGUCGACGAAGUCGCAUACCACGAAAAGUACCCGACAAUCUACCACCUGAGAAAGAAGCUGGUCGACAGCACAGACAAGGCAGACCUGAG |
| | fusion | ACUGAUCUACCUGGCACUGGCACACAUGAUCAAGUUCAGAGGACACUUCCUGAUCGAAGGAGACCUGAACCCGGACAACAGCGACGUCGAC |
| | ORF | AAGCUGUUCAUCCAGCUGGUCCAGACAUACAACCAGCUGUUCGAAGAAAACCCGAUCAACGCAAGCGGAGUCGACGCAAAGGCAAUCCUGA |
| | | GCGCAAGACUGAGCAAGAGCAGAAGACUGGAAAACCUGAUCGCACAGCUGCCGGGAGAAAAGAAGAACGGACUGUUCGGAAACCUGAUCGC |
| | | ACUGAGCCUGGGACUGACACCGAACUUCAAGAGCAACUUCGACCUGGCAGAAGACGCAAAGCUGCAGCUGAGCAAGGACACAUACGACGAC |
| | | GACCUGGACAACCUGCUGGCACAGAUCGGAGACCAGUACGCAGACCUGUUCCUGGCAGCAAAGAACCUGAGCGACGCAAUCCUGCUGAGCG |
| | | ACAUCCUGAGAGUCAACACAGAAAUCACAAAGGCACCGCUGAGCGCAAGCAUGAUCAAGAGAUACGACGAACACCACCAGGACCUGACACU |
| | | GCUGAAGGCACUGGUCAGACAGCAGCUGCCGGAAAAGUACAAGGAAAUCUUCUUCGACCAGAGCAAGAACGGAUACGCAGGAUACAUCGAC |
| | | GGAGGAGCAAGCCAGGAAGAAUUCUACAAGUUCAUCAAGCCGAUCCUGGAAAAGAUGGACGGAACAGAAGAACUGCUGGUCAAGCUGAACA |
| | | GAGAAGACCUGCUGAGAAAGCAGAGAACAUUCGACAACGGAAGCAUCCCGCACCAGAUCCACCUGGGAGAACUGCACGCAAUCCUGAGAAG |
| | | ACAGGAAGACUUCUACCCGUUCCUGAAGGACAACAGAGAAAAGAUCGAAAAGAUCCUGACAUUCAGAAUCCCGUACUACGUCGGACCGCUG |
| | | GCAAGAGGAAACAGCAGAUUCGCAUGGAUGACAAGAAAGAGCGAAGAAACAAUCACACCGUGGAACUUCGAAGAAGUCGUCGACAAGGGAG |
| | | CAAGCGCACAGAGCUUCAUCGAAAGAAUGACAAACUUCGACAAGAACCUGCCGAACGAAAAGGUCCUGCCGAAGCACAGCCUGCUGUACGA |
| | | AUACUUCACAGUCUACAACGAACUGACAAAGGUCAAGUACGUCACAGAAGGAAUGAGAAAGCCGGCAUUCCUGAGCGGAGAACAGAAGAAG |
| | | GCAAUCGUCGACCUGCUGUUCAAGACAAACAGAAAGGUCACAGUCAAGCAGCUGAAGGAAGACUACUUCAAGAAGAUCGAAUGCUUCGACA |
| | | GCGUCGAAAUCAGCGGAGUCGAAGACAGAUUCAACGCAAGCCUGGGAACAUACCACGACCUGCUGAAGAUCAUCAAGGACAAGGACUUCCU |
| | | GGACAACGAAGAAAACGAAGACAUCCUGGAAGACAUCGUCCUGACACUGACACUGUUCGAAGACAGAGAAAUGAUCGAAGAAAGACUGAAG |
| | | ACAUACGCACACCUGUUCGACGACAAGGUCAUGAAGCAGCUGAAGAGAAGAAGAUACACAGGAUGGGGAAGACUGAGCAGAAAGCUGAUCA |
| | | ACGGAAUCAGAGACAAGCAGAGCGGAAAGACAAUCCUGGACUUCCUGAAGAGCGACGGAUUCGCAAACAGAAACUUCAUGCAGCUGAUCCA |
| | | CGACGACAGCCUGACAUUCAAGGAAGACAUCCAGAAGGCACAGGUCAGCGGACAGGGAGACAGCCUGCACGAACACAUCGCAAACCUGGCA |
| | | GGAAGCCCGGCAAUCAAGAAGGGAAUCCUGCAGACAGUCAAGGUCGUCGACGAACUGGUCAAGGUCAUGGGAAGACACAAGCCGGAAAACA |
| | | UCGUCAUCGAAAUGGCAAGAGAAAACCAGACAACACAGAAGGGACAGAAGAACAGCAGAGAAAGAAUGAAGAGAAUCGAAGAAGGAAUCAA |
| | | GGAACUGGGAAGCCAGAUCCUGAAGGAACACCCGGUCGAAAACACACAGCUGCAGAACGAAAAGCUGUACCUGUACUACCUGCAGAACGGA |
| | | AGAGACAUGUACGUCGACCAGGAACUGGACAUCAACAGACUGAGCGACUACGACGUCGACCACAUCGUCCCGCAGAGCUUCCUGAAGGACG |
| | | ACAGCAUCGACAACAAGGUCCUGACAAGAAGCGACAAGAACAGAGGAAAGAGCGACAACGUCCCGAGCGAAGAAGUCGUCAAGAAGAUGAA |
| | | GAACUACUGGAGACAGCUGCUGAACGCAAAGCUGAUCACACAGAGAAAGUUCGACAACCUGACAAAGGCAGAGAGAGGAGGACUGAGCGAA |
| | | CUGGACAAGGCAGGAUUCAUCAAGAGACAGCUGGUCGAAACAAGACAGAUCACAAAGCACGUCGCACAGAUCCUGGACAGCAGAAUGAACA |
| | | CAAAGUACGACGAAAACGACAAGCUGAUCAGAGAAGUCAAGGUCAUCACACUGAAGAGCAAGCUGGUCAGCGACUUCAGAAAGGACUUCCA |
| | | GUUCUACAAGGUCAGAGAAAUCAACAACUACCACCACGCACACGACGCAUACCUGAACGCAGUCGUCGGAACAGCACUGAUCAAGAAGUAC |
| | | CCGAAGCUGGAAAGCGAAUUCGUCUACGGAGACUACAAGGUCUACGACGUCAGAAAGAUGAUCGCAAAGAGCGAACAGGAAAUCGGAAAGG |
| | | CAACAGCAAAGUACUUCUUCUACAGCAACAUCAUGAACUUCUUCAAGACAGAAAUCACACUGGCAAACGGAGAAAUCAGAAAGAGACCGCU |
| | | GAUCGAAACAAACGGAGAAACAGGAGAAAUCGUCUGGGACAAGGGAAGAGACUUCGCAACAGUCAGAAAGGUCCUGAGCAUGCCGCAGGUC |
| | | AACAUCGUCAAGAAGACAGAAGUCCAGACAGGAGGAUUCAGCAAGGAAAGCAUCCUGCCGAAGAGAAACAGCGACAAGCUGAUCGCAAGAA |
| | | AGAAGGACUGGGACCCGAAGAAGUACGGAGGAUUCGACAGCCCGACAGUCGCAUACAGCGUCCUGGUCGUCGCAAAGGUCGAAAAGGGAAA |
| | | GAGCAAGAAGCUGAAGAGCGUCAAGGAACUGCUGGGAAUCACAAUCAUGGAAAGAAGCAGCUUCGAAAAGAACCCGAUCGACUUCCUGGAA |
| | | GCAAAGGGAUACAAGGAAGUCAAGAAGGACCUGAUCAUCAAGCUGCCGAAGUACAGCCUGUUCGAACUGGAAAACGGAAGAAAGAGAAUGC |
| | | UGGCAAGCGCAGGAGAACUGCAGAAGGGAAACGAACUGGCACUGCCGAGCAAGUACGUCAACUUCCUGUACCUGGCAAGCCACUACGAAAA |
| | | GCUGAAGGGAAGCCCGGAAGACAACGAACAGAAGCAGCUGUUCGUCGAACAGCACAAGCACUACCUGGACGAAAUCAUCGAACAGAUCAGC |
| | | GAAUUCAGCAAGAGAGUCAUCCUGGCAGACGCAAACCUGGACAAGGUCCUGAGCGCAUACAACAAGCACAGAGACAAGCCGAUCAGAGAAC |
| | | AGGCAGAAAACAUCAUCCACCUGUUCACACUGACAAACCUGGGAGCACCGGCAGCAUUCAAGUACUUCGACACAACAAUCGACAGAAAGuC |
| | | AUACACAAGCACAAAGGAAGUCCUGGACGCAACACUGAUCCACCAGAGCAUCACAGGACUGUACGAAACAAGAAUCGACCUGAGCCAGCUG |
| | | GGAGGAGACGGCGCGCCUGAGUCUGCUACAGAAAGUGGGGGAACCUCCACAGAGUCUGAAGGAAGUGCCGGCACUUCAACCGAGAGCGAAG |
| | | GGUCCGCUGGAUCUGCAGGCUCCACAUCUACUGAGGAAGGCACCAGUACAGAGUCAGAAGGCAGCGCCGGAACUUCCACCGAGUCUGAAGG |
| | | CAGUGCCGGGACAAGUGAAUCAGCUACUGAAAGCGGCGGGACAUCAACUGAGAGCGAAGGAUCCAGUUCCGGAGCAGCAUUCAAGCCGAAC |
| | | UCGAUCAACUACAUCCUGGGACUGGACAUCGGAAUCGCAUCGGUCGGAUGGGCAAUGGUCGAAAUCGACGAAGAAGAAAACCCGAUCAGAC |
| | | UGAUCGACCUGGGAGUCAGAGUCUUCGAAAGAGCAGAAGUCCCGAAGACAGGAGACUCGCUGGCAAUGGCAAGAAGACUGGCAAGAUCGGU |
| | | CAGAAGACUGACAAGAAGAAGAGCACACAGACUGCUGAGAACAAGAAGACUGCUGAAGAGAGAAGGAGUCCUGCAGGCAGCAAACUUCGAC |
| | | GAAAACGGACUGAUCAAGUCGCUGCCGAACACACCGUGGCAGCUGAGAGCAGCAGCACUGGACAGAAAGCUGACACCGCUGGAAUGGUCGG |
| | | CAGUCCUGCUGCACCUGAUCAAGCACAGAGGAUACCUGUCGCAGAGAAAGAACGAAGGAGAAACAGCAGACAAGGAACUGGGAGCACUGCU |
| | | GAAGGGAGUCGCAGGAAACGCACACGCACUGCAGACAGGAGACUUCAGAACACCGGCAGAACUGGCACUGAACAAGUUCGAAAAGGAAUCG |
| | | GGACACAUCAGAAACCAGAGAUCGGACUACUCGCACACAUUCUCGAGAAAGGACCUGCAGGCAGAACUGAUCCUGCUGUUCGAAAAGCAGA |
| | | AGGAAUUCGGAAACCCGCACGUCUCGGGAGGACUGAAGGAAGGAAUCGAAACACUGCUGAUGACACAGAGACCGGCACUGUCGGGAGACGC |
| | | AGUCCAGAAGAUGCUGGGACACUGCACAUUCGAACCGGCAGAACCGAAGGCAGCAAAGAACACAUACACAGCAGAAAGAUUCAUCUGGCUG |
| | | ACAAAGCUGAACAACCUGAGAAUCCUGGAACAGGGAUCGGAAAGACCGCUGACAGACACAGAAAGAGCAACACUGAUGGACGAACCGUACA |
| | | GAAAGUCGAAGCUGACAUACGCACAGGCAAGAAAGCUGCUGGGACUGGAAGACACAGCAUUCUUCAAGGGACUGAGAUACGGAAAGGACAA |
| | | CGCAGAAGCAUCGACACUGAUGGAAAUGAAGGCAUACCACGCAAUCUCGAGAGCACUGGAAAAGGAAGGACUGAAGGACAAGAAGUCGCCG |
| | | CUGAACCUGUCGCCGGAACUGCAGGACGAAAUCGGAACAGCAUUCUCGCUGUUCAAGACAGACGAAGACAUCACAGGAAGACUGAAGGACA |
| | | GAAUCCAGCCGGAAAUCCUGGAAGCACUGCUGAAGCACAUCUCGUUCGACAAGUUCGUCCAGAUCUCGCUGAAGGCACUGAGAAGAAUCGU |
| | | CCCGCUGAUGGAACAGGGAAAGAGAUACGACGAAGCAUGCGCAGAAAUCUACGGAGACCACUACGGAAAGAAGAACACAGAAGAAAAGAUC |
| | | UACCUGCCGCCGAUCCCGGCAGACGAAAUCAGAAACCCGGUCGUCCUGAGAGCACUGUCGCAGGCAAGAAAGGUCAUCAACGGAGUCGUCA |
| | | GAAGAUACGGAUCGCCGGCAAGAAUCCACAUCGAAACAGCAAGAGAAGUCGGAAAGUCGUUCAAGGACAGAAAGGAAAUCGAAAAGAGACA |
| | | GGAAGAAAACAGAAAGGACAGAGAAAAGGCAGCAGCAAAGUUCAGAGAAUACUUCCCGAACUUCGUCGGAGAACCGAAGUCGAAGGACAUC |
| | | CUGAAGCUGAGACUGUACGAACAGCAGCACGGAAAGUGCCUGUACUCGGGAAAGGAAAUCAACCUGGGAAGACUGAACGAAAAGGGAUACG |
| | | UCGAAAUCGACCACGCACUGCCGUUCUCGAGAACAUGGGACGACUCGUUCAACAACAAGGUCCUGGUCCUGGGAUCGGAAAACCAGAACAA |
| | | GGGAAACCAGACACCGUACGAAUACUUCAACGGAAAGGACAACUCGAGAGAAUGGCAGGAAUUCAAGGCAAGAGUCGAAACAUCGAGAUUC |
| | | CCGAGAUCGAAGAAGCAGAGAAUCCUGCUGCAGAAGUUCGACGAAGACGGAUUCAAGGAAAGAAACCUGAACGACACAAGAUACGUCAACA |
| | | GAUUCCUGUGCCAGUUCGUCGCAGACAGAAUGAGACUGACAGGAAAGGGAAAGAAGAGAGUCUUCGCAUCGAACGGACAGAUCACAAACCU |
| | | GCUGAGAGGAUUCUGGGGACUGAGAAAGGUCAGAGCAGAAAACGACAGACACCACGCACUGGACGCAGUCGUCGUCGCAUGCUCGACAGUC |
| | | GCAAUGCAGCAGAAGAUCACAAGAUUCGUCAGAUACAAGGAAAUGAACGCAUUCGACGGAAAGACAAUCGACAAGGAAACAGGAGAAGUCC |
| | | UGCACCAGAAGACACACUUCCCGCAGCCGUGGGAAUUCUUCGCACAGGAAGUCAUGAUCAGAGUCUUCGGAAAGCCGGACGGAAAGCCGGA |
| | | AUUCGAAGAAGCAGACACACUGGAAAAGCUGAGAACACUGCUGGCAGAAAAGCUGUCGUCGAGACCGGAAGCAGUCCACGAAUACGUCACA |
| | | CCGCUGUUCGUCUCGAGAGCACCGAACAGAAAGAUGUCGGGACAGGGACACAUGGAAACAGUCAAGUCGGCAAAGAGACUGGACGAAGGAG |
| | | UCUCGGUCCUGAGAGUCCCGCUGACACAGCUGAAGCUGAAGGACCUGGAAAAGAUGGUCAACAGAGAAAGAGAACCGAAGCUGUACGAAGC |
| | | ACUGAAGGCAAGACUGGAAGCACACAAGGACGACCCGGCAAAGGCAUUCGCAGAACCGUUCUACAAGUACGACAAGGCAGGAAACAGAACA |
| | | CAGCAGGUCAAGGCAGUCAGAGUCGAACAGGUCCAGAAGACAGGAGUCUGGGUCAGAAACCACAACGGAAUCGCAGACAACGCAACAAUGG |
| | | UCAGAGUAGACGUCUUCGAAAAGGGAGACAAGUACUACCUGGUCCCGAUCUACUCGUGGCAGGUCGCAAAGGGAAUCCUGCCGGACAGAGC |
| | | AGUCGUCCAGGGAAAGGACGAAGAAGACUGGCAGCUGAUCGACGACUCGUUCAACUUCAAGUUCUCGCUGCACCCGAACGACCUGGUCGAA |
| | | GUCAUCACAAAGAAGGCAAGAAUGUUCGGAUACUUCGCAUCGUGCCACAGAGGAACAGGAAACAUCAACAUCAGAAUCCACGACCUGGACC |
| | | ACAAGAUCGGAAAGAACGGAAUCCUGGAAGGAAUCGGAGUCAAGACAGCACUGUCGUUCCAGAAGUACCAGAUCGACGAACUGGGAAAGGA |
| | | AAUCAGACCGUGCAGACUGAAGAAGAGACCGCCGGUCAGAUCCGGAAAGAGAACAGCAGACGGAUCGGAAUUCGAAUCGCCGAAGAAGAAG |
| | | AGAAAGGUCGAAUGA |
| 99 | Spy- | MDKKYSIGLDIGTNSVGWAVITDEYKVPSKKFKVLGNTDRHSIKKNLIGALLFDSGETAEATRLKRTARRRYTRRKNRICYLQEIFSNEMA |
| | R1335S | KVDDSFFHRLEESFLVEEDKKHERHPIFGNIVDEVAYHEKYPTIYHLRKKLVDSTDKADLRLIYLALAHMIKFRGHFLIEGDLNPDNSDVD |
| | Cas9- | KLFIQLVQTYNQLFEENPINASGVDAKAILSARLSKSRRLENLIAQLPGEKKNGLFGNLIALSLGLTPNFKSNFDLAEDAKLQLSKDTYDD |
| | WT | DLDNLLAQIGDQYADLFLAAKNLSDAILLSDILRVNTEITKAPLSASMIKRYDEHHQDLTLLKALVRQQLPEKYKEIFFDQSKNGYAGYID |
| | NmeCas9 | GGASQEEFYKFIKPILEKMDGTEELLVKLNREDLLRKQRTFDNGSIPHQIHLGELHAILRRQEDFYPFLKDNREKIEKILTFRIPYYVGPL |
| | fusion | ARGNSRFAWMTRKSEETITPWNFEEVVDKGASAQSFIERMTNFDKNLPNEKVLPKHSLLYEYFTVYNELTKVKYVTEGMRKPAFLSGEQKK |
| | amino | AIVDLLFKTNRKVTVKQLKEDYFKKIECFDSVEISGVEDRFNASLGTYHDLLKIIKDKDFLDNEENEDILEDIVLTLTLFEDREMIEERLK |
| | acid | TYAHLFDDKVMKQLKRRRYTGWGRLSRKLINGIRDKQSGKTILDFLKSDGFANRNFMQLIHDDSLTFKEDIQKAQVSGQGDSLHEHIANLA |
| | sequence | GSPAIKKGILQTVKVVDELVKVMGRHKPENIVIEMARENQTTQKGQKNSRERMKRIEEGIKELGSQILKEHPVENTQLQNEKLYLYYLQNG |
| | | RDMYVDQELDINRLSDYDVDHIVPQSFLKDDSIDNKVLTRSDKNRGKSDNVPSEEVVKKMKNYWRQLLNAKLITQRKFDNLTKAERGGLSE |
| | | LDKAGFIKRQLVETRQITKHVAQILDSRMNTKYDENDKLIREVKVITLKSKLVSDFRKDFQFYKVREINNYHHAHDAYLNAVVGTALIKKY |
| | | PKLESEFVYGDYKVYDVRKMIAKSEQEIGKATAKYFFYSNIMNFFKTEITLANGEIRKRPLIETNGETGEIVWDKGRDFATVRKVLSMPQV |
| | | NIVKKTEVQTGGFSKESILPKRNSDKLIARKKDWDPKKYGGFDSPTVAYSVLVVAKVEKGKSKKLKSVKELLGITIMERSSFEKNPIDFLE |
| | | AKGYKEVKKDLIIKLPKYSLFELENGRKRMLASAGELQKGNELALPSKYVNFLYLASHYEKLKGSPEDNEQKQLFVEQHKHYLDEIIEQIS |
| | | EFSKRVILADANLDKVLSAYNKHRDKPIREQAENIIHLFTLTNLGAPAAFKYFDTTIDRKSYTSTKEVLDATLIHQSITGLYETRIDLSQL |
| | | GGDGAPESATESGGTSTESEGSAGTSTESEGSAGSAGSTSTEEGTSTESEGSAGTSTESEGSAGTSESATESGGTSTESEGSSSGAAFKPN |
| | | SINYILGLDIGIASVGWAMVEIDEEENPIRLIDLGVRVFERAEVPKTGDSLAMARRLARSVRRLTRRRAHRLLRTRRLLKREGVLQAANFD |
| | | ENGLIKSLPNTPWQLRAAALDRKLTPLEWSAVLLHLIKHRGYLSQRKNEGETADKELGALLKGVAGNAHALQTGDFRTPAELALNKFEKES |
| | | GHIRNQRSDYSHTFSRKDLQAELILLFEKQKEFGNPHVSGGLKEGIETLLMTQRPALSGDAVQKMLGHCTFEPAEPKAAKNTYTAERFIWL |
| | | TKLNNLRILEQGSERPLTDTERATLMDEPYRKSKLTYAQARKLLGLEDTAFFKGLRYGKDNAEASTLMEMKAYHAISRALEKEGLKDKKSP |
| | | LNLSPELQDEIGTAFSLFKTDEDITGRLKDRIQPEILEALLKHISFDKFVQISLKALRRIVPLMEQGKRYDEACAEIYGDHYGKKNTEEKI |
| | | YLPPIPADEIRNPVVLRALSQARKVINGVVRRYGSPARIHIETAREVGKSFKDRKEIEKRQEENRKDREKAAAKFREYFPNFVGEPKSKDI |
| | | LKLRLYEQQHGKCLYSGKEINLGRLNEKGYVEIDHALPFSRTWDDSFNNKVLVLGSENQNKGNQTPYEYFNGKDNSREWQEFKARVETSRF |
| | | PRSKKQRILLQKFDEDGFKERNLNDTRYVNRFLCQFVADRMRLTGKGKKRVFASNGQITNLLRGFWGLRKVRAENDRHHALDAVVVACSTV |
| | | AMQQKITRFVRYKEMNAFDGKTIDKETGEVLHQKTHFPQPWEFFAQEVMIRVFGKPDGKPEFEEADTLEKLRTLLAEKLSSRPEAVHEYVT |
| | | PLFVSRAPNRKMSGQGHMETVKSAKRLDEGVSVLRVPLTQLKLKDLEKMVNREREPKLYEALKARLEAHKDDPAKAFAEPFYKYDKAGNRT |
| | | QQVKAVRVEQVQKTGVWVRNHNGIADNATMVRVDVFEKGDKYYLVPIYSWQVAKGILPDRAVVQGKDEEDWQLIDDSFNFKFSLHPNDLVE |
| | | VITKKARMFGYFASCHRGTGNINIRIHDLDHKIGKNGILEGIGVKTALSFQKYQIDELGKEIRPCRLKKRPPVRSGKRTADGSEFESPKKK |
| | | RKVE* |
| 100 | R1333K | AUGGACAAGAAGUACAGCAUCGGACUGGACAUCGGAACAAACAGCGUCGGAUGGGCAGUCAUCACAGACGAAUACAAGGUCCCGAGCAAGA |
| | Spy-WT | AGUUCAAGGUCCUGGGAAACACAGACAGACACAGCAUCAAGAAGAACCUGAUCGGAGCACUGCUGUUCGACAGCGGAGAAACAGCAGAAGC |
| | NmeCas9 | AACAAGACUGAAGAGAACAGCAAGAAGAAGAUACACAAGAAGAAAGAACAGAAUCUGCUACCUGCAGGAAAUCUUCAGCAACGAAAUGGCA |
| | fusion | AAGGUCGACGACAGCUUCUUCCACAGACUGGAAGAAAGCUUCCUGGUCGAAGAAGACAAGAAGCACGAAAGACACCCGAUCUUCGGAAACA |
| | ORF | UCGUCGACGAAGUCGCAUACCACGAAAAGUACCCGACAAUCUACCACCUGAGAAAGAAGCUGGUCGACAGCACAGACAAGGCAGACCUGAG |
| | | ACUGAUCUACCUGGCACUGGCACACAUGAUCAAGUUCAGAGGACACUUCCUGAUCGAAGGAGACCUGAACCCGGACAACAGCGACGUCGAC |
| | | AAGCUGUUCAUCCAGCUGGUCCAGACAUACAACCAGCUGUUCGAAGAAAACCCGAUCAACGCAAGCGGAGUCGACGCAAAGGCAAUCCUGA |
| | | GCGCAAGACUGAGCAAGAGCAGAAGACUGGAAAACCUGAUCGCACAGCUGCCGGGAGAAAAGAAGAACGGACUGUUCGGAAACCUGAUCGC |
| | | ACUGAGCCUGGGACUGACACCGAACUUCAAGAGCAACUUCGACCUGGCAGAAGACGCAAAGCUGCAGCUGAGCAAGGACACAUACGACGAC |
| | | GACCUGGACAACCUGCUGGCACAGAUCGGAGACCAGUACGCAGACCUGUUCCUGGCAGCAAAGAACCUGAGCGACGCAAUCCUGCUGAGCG |
| | | ACAUCCUGAGAGUCAACACAGAAAUCACAAAGGCACCGCUGAGCGCAAGCAUGAUCAAGAGAUACGACGAACACCACCAGGACCUGACACU |
| | | GCUGAAGGCACUGGUCAGACAGCAGCUGCCGGAAAAGUACAAGGAAAUCUUCUUCGACCAGAGCAAGAACGGAUACGCAGGAUACAUCGAC |
| | | GGAGGAGCAAGCCAGGAAGAAUUCUACAAGUUCAUCAAGCCGAUCCUGGAAAAGAUGGACGGAACAGAAGAACUGCUGGUCAAGCUGAACA |
| | | GAGAAGACCUGCUGAGAAAGCAGAGAACAUUCGACAACGGAAGCAUCCCGCACCAGAUCCACCUGGGAGAACUGCACGCAAUCCUGAGAAG |
| | | ACAGGAAGACUUCUACCCGUUCCUGAAGGACAACAGAGAAAAGAUCGAAAAGAUCCUGACAUUCAGAAUCCCGUACUACGUCGGACCGCUG |
| | | GCAAGAGGAAACAGCAGAUUCGCAUGGAUGACAAGAAAGAGCGAAGAAACAAUCACACCGUGGAACUUCGAAGAAGUCGUCGACAAGGGAG |
| | | CAAGCGCACAGAGCUUCAUCGAAAGAAUGACAAACUUCGACAAGAACCUGCCGAACGAAAAGGUCCUGCCGAAGCACAGCCUGCUGUACGA |
| | | AUACUUCACAGUCUACAACGAACUGACAAAGGUCAAGUACGUCACAGAAGGAAUGAGAAAGCCGGCAUUCCUGAGCGGAGAACAGAAGAAG |
| | | GCAAUCGUCGACCUGCUGUUCAAGACAAACAGAAAGGUCACAGUCAAGCAGCUGAAGGAAGACUACUUCAAGAAGAUCGAAUGCUUCGACA |
| | | GCGUCGAAAUCAGCGGAGUCGAAGACAGAUUCAACGCAAGCCUGGGAACAUACCACGACCUGCUGAAGAUCAUCAAGGACAAGGACUUCCU |
| | | GGACAACGAAGAAAACGAAGACAUCCUGGAAGACAUCGUCCUGACACUGACACUGUUCGAAGACAGAGAAAUGAUCGAAGAAAGACUGAAG |
| | | ACAUACGCACACCUGUUCGACGACAAGGUCAUGAAGCAGCUGAAGAGAAGAAGAUACACAGGAUGGGGAAGACUGAGCAGAAAGCUGAUCA |
| | | ACGGAAUCAGAGACAAGCAGAGCGGAAAGACAAUCCUGGACUUCCUGAAGAGCGACGGAUUCGCAAACAGAAACUUCAUGCAGCUGAUCCA |
| | | CGACGACAGCCUGACAUUCAAGGAAGACAUCCAGAAGGCACAGGUCAGCGGACAGGGAGACAGCCUGCACGAACACAUCGCAAACCUGGCA |
| | | GGAAGCCCGGCAAUCAAGAAGGGAAUCCUGCAGACAGUCAAGGUCGUCGACGAACUGGUCAAGGUCAUGGGAAGACACAAGCCGGAAAACA |
| | | UCGUCAUCGAAAUGGCAAGAGAAAACCAGACAACACAGAAGGGACAGAAGAACAGCAGAGAAAGAAUGAAGAGAAUCGAAGAAGGAAUCAA |
| | | GGAACUGGGAAGCCAGAUCCUGAAGGAACACCCGGUCGAAAACACACAGCUGCAGAACGAAAAGCUGUACCUGUACUACCUGCAGAACGGA |
| | | AGAGACAUGUACGUCGACCAGGAACUGGACAUCAACAGACUGAGCGACUACGACGUCGACCACAUCGUCCCGCAGAGCUUCCUGAAGGACG |
| | | ACAGCAUCGACAACAAGGUCCUGACAAGAAGCGACAAGAACAGAGGAAAGAGCGACAACGUCCCGAGCGAAGAAGUCGUCAAGAAGAUGAA |
| | | GAACUACUGGAGACAGCUGCUGAACGCAAAGCUGAUCACACAGAGAAAGUUCGACAACCUGACAAAGGCAGAGAGAGGAGGACUGAGCGAA |
| | | CUGGACAAGGCAGGAUUCAUCAAGAGACAGCUGGUCGAAACAAGACAGAUCACAAAGCACGUCGCACAGAUCCUGGACAGCAGAAUGAACA |
| | | CAAAGUACGACGAAAACGACAAGCUGAUCAGAGAAGUCAAGGUCAUCACACUGAAGAGCAAGCUGGUCAGCGACUUCAGAAAGGACUUCCA |
| | | GUUCUACAAGGUCAGAGAAAUCAACAACUACCACCACGCACACGACGCAUACCUGAACGCAGUCGUCGGAACAGCACUGAUCAAGAAGUAC |
| | | CCGAAGCUGGAAAGCGAAUUCGUCUACGGAGACUACAAGGUCUACGACGUCAGAAAGAUGAUCGCAAAGAGCGAACAGGAAAUCGGAAAGG |
| | | CAACAGCAAAGUACUUCUUCUACAGCAACAUCAUGAACUUCUUCAAGACAGAAAUCACACUGGCAAACGGAGAAAUCAGAAAGAGACCGCU |
| | | GAUCGAAACAAACGGAGAAACAGGAGAAAUCGUCUGGGACAAGGGAAGAGACUUCGCAACAGUCAGAAAGGUCCUGAGCAUGCCGCAGGUC |
| | | AACAUCGUCAAGAAGACAGAAGUCCAGACAGGAGGAUUCAGCAAGGAAAGCAUCCUGCCGAAGAGAAACAGCGACAAGCUGAUCGCAAGAA |
| | | AGAAGGACUGGGACCCGAAGAAGUACGGAGGAUUCGACAGCCCGACAGUCGCAUACAGCGUCCUGGUCGUCGCAAAGGUCGAAAAGGGAAA |
| | | GAGCAAGAAGCUGAAGAGCGUCAAGGAACUGCUGGGAAUCACAAUCAUGGAAAGAAGCAGCUUCGAAAAGAACCCGAUCGACUUCCUGGAA |
| | | GCAAAGGGAUACAAGGAAGUCAAGAAGGACCUGAUCAUCAAGCUGCCGAAGUACAGCCUGUUCGAACUGGAAAACGGAAGAAAGAGAAUGC |
| | | UGGCAAGCGCAGGAGAACUGCAGAAGGGAAACGAACUGGCACUGCCGAGCAAGUACGUCAACUUCCUGUACCUGGCAAGCCACUACGAAAA |
| | | GCUGAAGGGAAGCCCGGAAGACAACGAACAGAAGCAGCUGUUCGUCGAACAGCACAAGCACUACCUGGACGAAAUCAUCGAACAGAUCAGC |
| | | GAAUUCAGCAAGAGAGUCAUCCUGGCAGACGCAAACCUGGACAAGGUCCUGAGCGCAUACAACAAGCACAGAGACAAGCCGAUCAGAGAAC |
| | | AGGCAGAAAACAUCAUCCACCUGUUCACACUGACAAACCUGGGAGCACCGGCAGCAUUCAAGUACUUCGACACAACAAUCGACaagAAGAG |
| | | AUACACAAGCACAAAGGAAGUCCUGGACGCAACACUGAUCCACCAGAGCAUCACAGGACUGUACGAAACAAGAAUCGACCUGAGCCAGCUG |
| | | GGAGGAGACGGCGCGCCUGAGUCUGCUACAGAAAGUGGGGGAACCUCCACAGAGUCUGAAGGAAGUGCCGGCACUUCAACCGAGAGCGAAG |
| | | GGUCCGCUGGAUCUGCAGGCUCCACAUCUACUGAGGAAGGCACCAGUACAGAGUCAGAAGGCAGCGCCGGAACUUCCACCGAGUCUGAAGG |
| | | CAGUGCCGGGACAAGUGAAUCAGCUACUGAAAGCGGCGGGACAUCAACUGAGAGCGAAGGAUCCAGUUCCGGAGCAGCAUUCAAGCCGAAC |
| | | UCGAUCAACUACAUCCUGGGACUGGACAUCGGAAUCGCAUCGGUCGGAUGGGCAAUGGUCGAAAUCGACGAAGAAGAAAACCCGAUCAGAC |
| | | UGAUCGACCUGGGAGUCAGAGUCUUCGAAAGAGCAGAAGUCCCGAAGACAGGAGACUCGCUGGCAAUGGCAAGAAGACUGGCAAGAUCGGU |
| | | CAGAAGACUGACAAGAAGAAGAGCACACAGACUGCUGAGAACAAGAAGACUGCUGAAGAGAGAAGGAGUCCUGCAGGCAGCAAACUUCGAC |
| | | GAAAACGGACUGAUCAAGUCGCUGCCGAACACACCGUGGCAGCUGAGAGCAGCAGCACUGGACAGAAAGCUGACACCGCUGGAAUGGUCGG |
| | | CAGUCCUGCUGCACCUGAUCAAGCACAGAGGAUACCUGUCGCAGAGAAAGAACGAAGGAGAAACAGCAGACAAGGAACUGGGAGCACUGCU |
| | | GAAGGGAGUCGCAGGAAACGCACACGCACUGCAGACAGGAGACUUCAGAACACCGGCAGAACUGGCACUGAACAAGUUCGAAAAGGAAUCG |
| | | GGACACAUCAGAAACCAGAGAUCGGACUACUCGCACACAUUCUCGAGAAAGGACCUGCAGGCAGAACUGAUCCUGCUGUUCGAAAAGCAGA |
| | | AGGAAUUCGGAAACCCGCACGUCUCGGGAGGACUGAAGGAAGGAAUCGAAACACUGCUGAUGACACAGAGACCGGCACUGUCGGGAGACGC |
| | | AGUCCAGAAGAUGCUGGGACACUGCACAUUCGAACCGGCAGAACCGAAGGCAGCAAAGAACACAUACACAGCAGAAAGAUUCAUCUGGCUG |
| | | ACAAAGCUGAACAACCUGAGAAUCCUGGAACAGGGAUCGGAAAGACCGCUGACAGACACAGAAAGAGCAACACUGAUGGACGAACCGUACA |
| | | GAAAGUCGAAGCUGACAUACGCACAGGCAAGAAAGCUGCUGGGACUGGAAGACACAGCAUUCUUCAAGGGACUGAGAUACGGAAAGGACAA |
| | | CGCAGAAGCAUCGACACUGAUGGAAAUGAAGGCAUACCACGCAAUCUCGAGAGCACUGGAAAAGGAAGGACUGAAGGACAAGAAGUCGCCG |
| | | CUGAACCUGUCGCCGGAACUGCAGGACGAAAUCGGAACAGCAUUCUCGCUGUUCAAGACAGACGAAGACAUCACAGGAAGACUGAAGGACA |
| | | GAAUCCAGCCGGAAAUCCUGGAAGCACUGCUGAAGCACAUCUCGUUCGACAAGUUCGUCCAGAUCUCGCUGAAGGCACUGAGAAGAAUCGU |
| | | CCCGCUGAUGGAACAGGGAAAGAGAUACGACGAAGCAUGCGCAGAAAUCUACGGAGACCACUACGGAAAGAAGAACACAGAAGAAAAGAUC |
| | | UACCUGCCGCCGAUCCCGGCAGACGAAAUCAGAAACCCGGUCGUCCUGAGAGCACUGUCGCAGGCAAGAAAGGUCAUCAACGGAGUCGUCA |
| | | GAAGAUACGGAUCGCCGGCAAGAAUCCACAUCGAAACAGCAAGAGAAGUCGGAAAGUCGUUCAAGGACAGAAAGGAAAUCGAAAAGAGACA |
| | | GGAAGAAAACAGAAAGGACAGAGAAAAGGCAGCAGCAAAGUUCAGAGAAUACUUCCCGAACUUCGUCGGAGAACCGAAGUCGAAGGACAUC |
| | | CUGAAGCUGAGACUGUACGAACAGCAGCACGGAAAGUGCCUGUACUCGGGAAAGGAAAUCAACCUGGGAAGACUGAACGAAAAGGGAUACG |
| | | UCGAAAUCGACCACGCACUGCCGUUCUCGAGAACAUGGGACGACUCGUUCAACAACAAGGUCCUGGUCCUGGGAUCGGAAAACCAGAACAA |
| | | GGGAAACCAGACACCGUACGAAUACUUCAACGGAAAGGACAACUCGAGAGAAUGGCAGGAAUUCAAGGCAAGAGUCGAAACAUCGAGAUUC |
| | | CCGAGAUCGAAGAAGCAGAGAAUCCUGCUGCAGAAGUUCGACGAAGACGGAUUCAAGGAAAGAAACCUGAACGACACAAGAUACGUCAACA |
| | | GAUUCCUGUGCCAGUUCGUCGCAGACAGAAUGAGACUGACAGGAAAGGGAAAGAAGAGAGUCUUCGCAUCGAACGGACAGAUCACAAACCU |
| | | GCUGAGAGGAUUCUGGGGACUGAGAAAGGUCAGAGCAGAAAACGACAGACACCACGCACUGGACGCAGUCGUCGUCGCAUGCUCGACAGUC |
| | | GCAAUGCAGCAGAAGAUCACAAGAUUCGUCAGAUACAAGGAAAUGAACGCAUUCGACGGAAAGACAAUCGACAAGGAAACAGGAGAAGUCC |
| | | UGCACCAGAAGACACACUUCCCGCAGCCGUGGGAAUUCUUCGCACAGGAAGUCAUGAUCAGAGUCUUCGGAAAGCCGGACGGAAAGCCGGA |
| | | AUUCGAAGAAGCAGACACACUGGAAAAGCUGAGAACACUGCUGGCAGAAAAGCUGUCGUCGAGACCGGAAGCAGUCCACGAAUACGUCACA |
| | | CCGCUGUUCGUCUCGAGAGCACCGAACAGAAAGAUGUCGGGACAGGGACACAUGGAAACAGUCAAGUCGGCAAAGAGACUGGACGAAGGAG |
| | | UCUCGGUCCUGAGAGUCCCGCUGACACAGCUGAAGCUGAAGGACCUGGAAAAGAUGGUCAACAGAGAAAGAGAACCGAAGCUGUACGAAGC |
| | | ACUGAAGGCAAGACUGGAAGCACACAAGGACGACCCGGCAAAGGCAUUCGCAGAACCGUUCUACAAGUACGACAAGGCAGGAAACAGAACA |
| | | CAGCAGGUCAAGGCAGUCAGAGUCGAACAGGUCCAGAAGACAGGAGUCUGGGUCAGAAACCACAACGGAAUCGCAGACAACGCAACAAUGG |
| | | UCAGAGUAGACGUCUUCGAAAAGGGAGACAAGUACUACCUGGUCCCGAUCUACUCGUGGCAGGUCGCAAAGGGAAUCCUGCCGGACAGAGC |
| | | AGUCGUCCAGGGAAAGGACGAAGAAGACUGGCAGCUGAUCGACGACUCGUUCAACUUCAAGUUCUCGCUGCACCCGAACGACCUGGUCGAA |
| | | GUCAUCACAAAGAAGGCAAGAAUGUUCGGAUACUUCGCAUCGUGCCACAGAGGAACAGGAAACAUCAACAUCAGAAUCCACGACCUGGACC |
| | | ACAAGAUCGGAAAGAACGGAAUCCUGGAAGGAAUCGGAGUCAAGACAGCACUGUCGUUCCAGAAGUACCAGAUCGACGAACUGGGAAAGGA |
| | | AAUCAGACCGUGCAGACUGAAGAAGAGACCGCCGGUCAGAUCCGGAAAGAGAACAGCAGACGGAUCGGAAUUCGAAUCGCCGAAGAAGAAG |
| | | AGAAAGGUCGAAUGA |
| | | MDKKYSIGLDIGTNSVGWAVITDEYKVPSKKFKVLGNTDRHSIKKNLIGALLFDSGETAEATRLKRTARRRYTRRKNRICYLQEIFSNEMA |
| 101 | R1333K | KVDDSFFHRLEESFLVEEDKKHERHPIFGNIVDEVAYHEKYPTIYHLRKKLVDSTDKADLRLIYLALAHMIKFRGHFLIEGDLNPDNSDVD |
| | Spy- | KLFIQLVQTYNQLFEENPINASGVDAKAILSARLSKSRRLENLIAQLPGEKKNGLFGNLIALSLGLTPNFKSNFDLAEDAKLQLSKDTYDD |
| | WT | DLDNLLAQIGDQYADLFLAAKNLSDAILLSDILRVNTEITKAPLSASMIKRYDEHHQDLTLLKALVRQQLPEKYKEIFFDQSKNGYAGYID |
| | NmeCas9 | GGASQEEFYKFIKPILEKMDGTEELLVKLNREDLLRKQRTFDNGSIPHQIHLGELHAILRRQEDFYPFLKDNREKIEKILTFRIPYYVGPL |
| | fusion | ARGNSRFAWMTRKSEETITPWNFEEVVDKGASAQSFIERMTNFDKNLPNEKVLPKHSLLYEYFTVYNELTKVKYVTEGMRKPAFLSGEQKK |
| | amino | AIVDLLFKTNRKVTVKQLKEDYFKKIECFDSVEISGVEDRFNASLGTYHDLLKIIKDKDFLDNEENEDILEDIVLTLTLFEDREMIEERLK |
| | acid | TYAHLFDDKVMKQLKRRRYTGWGRLSRKLINGIRDKQSGKTILDFLKSDGFANRNFMQLIHDDSLTFKEDIQKAQVSGQGDSLHEHIANLA |
| | sequence | GSPAIKKGILQTVKVVDELVKVMGRHKPENIVIEMARENQTTQKGQKNSRERMKRIEEGIKELGSQILKEHPVENTQLQNEKLYLYYLQNG |
| | | RDMYVDQELDINRLSDYDVDHIVPQSFLKDDSIDNKVLTRSDKNRGKSDNVPSEEVVKKMKNYWRQLLNAKLITQRKFDNLTKAERGGLSE |
| | | LDKAGFIKRQLVETRQITKHVAQILDSRMNTKYDENDKLIREVKVITLKSKLVSDFRKDFQFYKVREINNYHHAHDAYLNAVVGTALIKKY |
| | | PKLESEFVYGDYKVYDVRKMIAKSEQEIGKATAKYFFYSNIMNFFKTEITLANGEIRKRPLIETNGETGEIVWDKGRDFATVRKVLSMPQV |
| | | NIVKKTEVQTGGFSKESILPKRNSDKLIARKKDWDPKKYGGFDSPTVAYSVLVVAKVEKGKSKKLKSVKELLGITIMERSSFEKNPIDFLE |
| | | AKGYKEVKKDLIIKLPKYSLFELENGRKRMLASAGELQKGNELALPSKYVNFLYLASHYEKLKGSPEDNEQKQLFVEQHKHYLDEIIEQIS |
| | | EFSKRVILADANLDKVLSAYNKHRDKPIREQAENIIHLFTLTNLGAPAAFKYFDTTIDKKRYTSTKEVLDATLIHQSITGLYETRIDLSQL |
| | | GGDGAPESATESGGTSTESEGSAGTSTESEGSAGSAGSTSTEEGTSTESEGSAGTSTESEGSAGTSESATESGGTSTESEGSSSGAAFKPN |
| | | SINYILGLDIGIASVGWAMVEIDEEENPIRLIDLGVRVFERAEVPKTGDSLAMARRLARSVRRLTRRRAHRLLRTRRLLKREGVLQAANFD |
| | | ENGLIKSLPNTPWQLRAAALDRKLTPLEWSAVLLHLIKHRGYLSQRKNEGETADKELGALLKGVAGNAHALQTGDFRTPAELALNKFEKES |
| | | GHIRNQRSDYSHTFSRKDLQAELILLFEKQKEFGNPHVSGGLKEGIETLLMTQRPALSGDAVQKMLGHCTFEPAEPKAAKNTYTAERFIWL |
| | | TKLNNLRILEQGSERPLTDTERATLMDEPYRKSKLTYAQARKLLGLEDTAFFKGLRYGKDNAEASTLMEMKAYHAISRALEKEGLKDKKSP |
| | | LNLSPELQDEIGTAFSLFKTDEDITGRLKDRIQPEILEALLKHISFDKFVQISLKALRRIVPLMEQGKRYDEACAEIYGDHYGKKNTEEKI |
| | | YLPPIPADEIRNPVVLRALSQARKVINGVVRRYGSPARIHIETAREVGKSFKDRKEIEKRQEENRKDREKAAAKFREYFPNFVGEPKSKDI |
| | | LKLRLYEQQHGKCLYSGKEINLGRLNEKGYVEIDHALPFSRTWDDSFNNKVLVLGSENQNKGNQTPYEYFNGKDNSREWQEFKARVETSRF |
| | | PRSKKQRILLQKFDEDGFKERNLNDTRYVNRFLCQFVADRMRLTGKGKKRVFASNGQITNLLRGFWGLRKVRAENDRHHALDAVVVACSTV |
| | | AMQQKITRFVRYKEMNAFDGKTIDKETGEVLHQKTHFPQPWEFFAQEVMIRVFGKPDGKPEFEEADTLEKLRTLLAEKLSSRPEAVHEYVT |
| | | PLFVSRAPNRKMSGQGHMETVKSAKRLDEGVSVLRVPLTQLKLKDLEKMVNREREPKLYEALKARLEAHKDDPAKAFAEPFYKYDKAGNRT |
| | | QQVKAVRVEQVQKTGVWVRNHNGIADNATMVRVDVFEKGDKYYLVPIYSWQVAKGILPDRAVVQGKDEEDWQLIDDSFNFKFSLHPNDLVE |
| | | VITKKARMFGYFASCHRGTGNINIRIHDLDHKIGKNGILEGIGVKTALSFQKYQIDELGKEIRPCRLKKRPPVRSGKRTADGSEFESPKKK |
| | | RKVE* |
| 102 | WT | AUGGACAAGAAGUACAGCAUCGGACUGGACAUCGGAACAAACAGCGUCGGAUGGGCAGUCAUCACAGACGAAUACAA |
| | SpyCas9- | GGUCCCGAGCAAGAAGUUCAAGGUCCUGGGAAACACAGACAGACACAGCAUCAAGAAGAACCUGAUCGGAGCACUGC |
| | WT | UGUUCGACAGCGGAGAAACAGCAGAAGCAACAAGACUGAAGAGAACAGCAAGAAGAAGAUACACAAGAAGAAAGAAC |
| | NmeCas9 | AGAAUCUGCUACCUGCAGGAAAUCUUCAGCAACGAAAUGGCAAAGGUCGACGACAGCUUCUUCCACAGACUGGAAGA |
| | fusion | AAGCUUCCUGGUCGAAGAAGACAAGAAGCACGAAAGACACCCGAUCUUCGGAAACAUCGUCGACGAAGUCGCAUACC |
| | ORF | ACGAAAAGUACCCGACAAUCUACCACCUGAGAAAGAAGCUGGUCGACAGCACAGACAAGGCAGACCUGAGACUGAUC |
| | | UACCUGGCACUGGCACACAUGAUCAAGUUCAGAGGACACUUCCUGAUCGAAGGAGACCUGAACCCGGACAACAGCGAC |
| | | GUCGACAAGCUGUUCAUCCAGCUGGUCCAGACAUACAACCAGCUGUUCGAAGAAAACCCGAUCAACGCAAGCGGAGUC |
| | | GACGCAAAGGCAAUCCUGAGCGCAAGACUGAGCAAGAGCAGAAGACUGGAAAACCUGAUCGCACAGCUGCCGGGAGA |
| | | AAAGAAGAACGGACUGUUCGGAAACCUGAUCGCACUGAGCCUGGGACUGACACCGAACUUCAAGAGCAACUUCGACC |
| | | UGGCAGAAGACGCAAAGCUGCAGCUGAGCAAGGACACAUACGACGACGACCUGGACAACCUGCUGGCACAGAUCGGA |
| | | GACCAGUACGCAGACCUGUUCCUGGCAGCAAAGAACCUGAGCGACGCAAUCCUGCUGAGCGACAUCCUGAGAGUCAAC |
| | | ACAGAAAUCACAAAGGCACCGCUGAGCGCAAGCAUGAUCAAGAGAUACGACGAACACCACCAGGACCUGACACUGCUG |
| | | AAGGCACUGGUCAGACAGCAGCUGCCGGAAAAGUACAAGGAAAUCUUCUUCGACCAGAGCAAGAACGGAUACGCAGG |
| | | AUACAUCGACGGAGGAGCAAGCCAGGAAGAAUUCUACAAGUUCAUCAAGCCGAUCCUGGAAAAGAUGGACGGAACAG |
| | | AAGAACUGCUGGUCAAGCUGAACAGAGAAGACCUGCUGAGAAAGCAGAGAACAUUCGACAACGGAAGCAUCCCGCAC |
| | | CAGAUCCACCUGGGAGAACUGCACGCAAUCCUGAGAAGACAGGAAGACUUCUACCCGUUCCUGAAGGACAACAGAGA |
| | | AAAGAUCGAAAAGAUCCUGACAUUCAGAAUCCCGUACUACGUCGGACCGCUGGCAAGAGGAAACAGCAGAUUCGCAU |
| | | GGAUGACAAGAAAGAGCGAAGAAACAAUCACACCGUGGAACUUCGAAGAAGUCGUCGACAAGGGAGCAAGCGCACAG |
| | | AGCUUCAUCGAAAGAAUGACAAACUUCGACAAGAACCUGCCGAACGAAAAGGUCCUGCCGAAGCACAGCCUGCUGUAC |
| | | GAAUACUUCACAGUCUACAACGAACUGACAAAGGUCAAGUACGUCACAGAAGGAAUGAGAAAGCCGGCAUUCCUGAG |
| | | CGGAGAACAGAAGAAGGCAAUCGUCGACCUGCUGUUCAAGACAAACAGAAAGGUCACAGUCAAGCAGCUGAAGGAAG |
| | | ACUACUUCAAGAAGAUCGAAUGCUUCGACAGCGUCGAAAUCAGCGGAGUCGAAGACAGAUUCAACGCAAGCCUGGGA |
| | | ACAUACCACGACCUGCUGAAGAUCAUCAAGGACAAGGACUUCCUGGACAACGAAGAAAACGAAGACAUCCUGGAAGA |
| | | CAUCGUCCUGACACUGACACUGUUCGAAGACAGAGAAAUGAUCGAAGAAAGACUGAAGACAUACGCACACCUGUUCG |
| | | ACGACAAGGUCAUGAAGCAGCUGAAGAGAAGAAGAUACACAGGAUGGGGAAGACUGAGCAGAAAGCUGAUCAACGGA |
| | | AUCAGAGACAAGCAGAGCGGAAAGACAAUCCUGGACUUCCUGAAGAGCGACGGAUUCGCAAACAGAAACUUCAUGCA |
| | | GCUGAUCCACGACGACAGCCUGACAUUCAAGGAAGACAUCCAGAAGGCACAGGUCAGCGGACAGGGAGACAGCCUGCA |
| | | CGAACACAUCGCAAACCUGGCAGGAAGCCCGGCAAUCAAGAAGGGAAUCCUGCAGACAGUCAAGGUCGUCGACGAACU |
| | | GGUCAAGGUCAUGGGAAGACACAAGCCGGAAAACAUCGUCAUCGAAAUGGCAAGAGAAAACCAGACAACACAGAAGG |
| | | GACAGAAGAACAGCAGAGAAAGAAUGAAGAGAAUCGAAGAAGGAAUCAAGGAACUGGGAAGCCAGAUCCUGAAGGAA |
| | | CACCCGGUCGAAAACACACAGCUGCAGAACGAAAAGCUGUACCUGUACUACCUGCAGAACGGAAGAGACAUGUACGUC |
| | | GACCAGGAACUGGACAUCAACAGACUGAGCGACUACGACGUCGACCACAUCGUCCCGCAGAGCUUCCUGAAGGACGAC |
| | | AGCAUCGACAACAAGGUCCUGACAAGAAGCGACAAGAACAGAGGAAAGAGCGACAACGUCCCGAGCGAAGAAGUCGU |
| | | CAAGAAGAUGAAGAACUACUGGAGACAGCUGCUGAACGCAAAGCUGAUCACACAGAGAAAGUUCGACAACCUGACAA |
| | | AGGCAGAGAGAGGAGGACUGAGCGAACUGGACAAGGCAGGAUUCAUCAAGAGACAGCUGGUCGAAACAAGACAGAUC |
| | | ACAAAGCACGUCGCACAGAUCCUGGACAGCAGAAUGAACACAAAGUACGACGAAAACGACAAGCUGAUCAGAGAAGU |
| | | CAAGGUCAUCACACUGAAGAGCAAGCUGGUCAGCGACUUCAGAAAGGACUUCCAGUUCUACAAGGUCAGAGAAAUCA |
| | | ACAACUACCACCACGCACACGACGCAUACCUGAACGCAGUCGUCGGAACAGCACUGAUCAAGAAGUACCCGAAGCUGG |
| | | AAAGCGAAUUCGUCUACGGAGACUACAAGGUCUACGACGUCAGAAAGAUGAUCGCAAAGAGCGAACAGGAAAUCGGA |
| | | AAGGCAACAGCAAAGUACUUCUUCUACAGCAACAUCAUGAACUUCUUCAAGACAGAAAUCACACUGGCAAACGGAGA |
| | | AAUCAGAAAGAGACCGCUGAUCGAAACAAACGGAGAAACAGGAGAAAUCGUCUGGGACAAGGGAAGAGACUUCGCAA |
| | | CAGUCAGAAAGGUCCUGAGCAUGCCGCAGGUCAACAUCGUCAAGAAGACAGAAGUCCAGACAGGAGGAUUCAGCAAG |
| | | GAAAGCAUCCUGCCGAAGAGAAACAGCGACAAGCUGAUCGCAAGAAAGAAGGACUGGGACCCGAAGAAGUACGGAGG |
| | | AUUCGACAGCCCGACAGUCGCAUACAGCGUCCUGGUCGUCGCAAAGGUCGAAAAGGGAAAGAGCAAGAAGCUGAAGA |
| | | GCGUCAAGGAACUGCUGGGAAUCACAAUCAUGGAAAGAAGCAGCUUCGAAAAGAACCCGAUCGACUUCCUGGAAGCA |
| | | AAGGGAUACAAGGAAGUCAAGAAGGACCUGAUCAUCAAGCUGCCGAAGUACAGCCUGUUCGAACUGGAAAACGGAAG |
| | | AAAGAGAAUGCUGGCAAGCGCAGGAGAACUGCAGAAGGGAAACGAACUGGCACUGCCGAGCAAGUACGUCAACUUCC |
| | | UGUACCUGGCAAGCCACUACGAAAAGCUGAAGGGAAGCCCGGAAGACAACGAACAGAAGCAGCUGUUCGUCGAACAG |
| | | CACAAGCACUACCUGGACGAAAUCAUCGAACAGAUCAGCGAAUUCAGCAAGAGAGUCAUCCUGGCAGACGCAAACCUG |
| | | GACAAGGUCCUGAGCGCAUACAACAAGCACAGAGACAAGCCGAUCAGAGAACAGGCAGAAAACAUCAUCCACCUGUUC |
| | | ACACUGACAAACCUGGGAGCACCGGCAGCAUUCAAGUACUUCGACACAACAAUCGACAGAAAGAGAUACACAAGCACA |
| | | AAGGAAGUCCUGGACGCAACACUGAUCCACCAGAGCAUCACAGGACUGUACGAAACAAGAAUCGACCUGAGCCAGCUG |
| | | GGAGGAGACGGCGCGCCUGAGUCUGCUACAGAAAGUGGGGGAACCUCCACAGAGUCUGAAGGAAGUGCCGGCACUUC |
| | | AACCGAGAGCGAAGGGUCCGCUGGAUCUGCAGGCUCCACAUCUACUGAGGAAGGCACCAGUACAGAGUCAGAAGGCA |
| | | GCGCCGGAACUUCCACCGAGUCUGAAGGCAGUGCCGGGACAAGUGAAUCAGCUACUGAAAGCGGCGGGACAUCAACU |
| | | GAGAGCGAAGGAUCCAGUUCCGGAGCAGCAUUCAAGCCGAACUCGAUCAACUACAUCCUGGGACUGGACAUCGGAAU |
| | | CGCAUCGGUCGGAUGGGCAAUGGUCGAAAUCGACGAAGAAGAAAACCCGAUCAGACUGAUCGACCUGGGAGUCAGAG |
| | | UCUUCGAAAGAGCAGAAGUCCCGAAGACAGGAGACUCGCUGGCAAUGGCAAGAAGACUGGCAAGAUCGGUCAGAAGA |
| | | CUGACAAGAAGAAGAGCACACAGACUGCUGAGAACAAGAAGACUGCUGAAGAGAGAAGGAGUCCUGCAGGCAGCAAA |
| | | CUUCGACGAAAACGGACUGAUCAAGUCGCUGCCGAACACACCGUGGCAGCUGAGAGCAGCAGCACUGGACAGAAAGCU |
| | | GACACCGCUGGAAUGGUCGGCAGUCCUGCUGCACCUGAUCAAGCACAGAGGAUACCUGUCGCAGAGAAAGAACGAAG |
| | | GAGAAACAGCAGACAAGGAACUGGGAGCACUGCUGAAGGGAGUCGCAGGAAACGCACACGCACUGCAGACAGGAGAC |
| | | UUCAGAACACCGGCAGAACUGGCACUGAACAAGUUCGAAAAGGAAUCGGGACACAUCAGAAACCAGAGAUCGGACUA |
| | | CUCGCACACAUUCUCGAGAAAGGACCUGCAGGCAGAACUGAUCCUGCUGUUCGAAAAGCAGAAGGAAUUCGGAAACC |
| | | CGCACGUCUCGGGAGGACUGAAGGAAGGAAUCGAAACACUGCUGAUGACACAGAGACCGGCACUGUCGGGAGACGCA |
| | | GUCCAGAAGAUGCUGGGACACUGCACAUUCGAACCGGCAGAACCGAAGGCAGCAAAGAACACAUACACAGCAGAAAG |
| | | AUUCAUCUGGCUGACAAAGCUGAACAACCUGAGAAUCCUGGAACAGGGAUCGGAAAGACCGCUGACAGACACAGAAA |
| | | GAGCAACACUGAUGGACGAACCGUACAGAAAGUCGAAGCUGACAUACGCACAGGCAAGAAAGCUGCUGGGACUGGAA |
| | | GACACAGCAUUCUUCAAGGGACUGAGAUACGGAAAGGACAACGCAGAAGCAUCGACACUGAUGGAAAUGAAGGCAUA |
| | | CCACGCAAUCUCGAGAGCACUGGAAAAGGAAGGACUGAAGGACAAGAAGUCGCCGCUGAACCUGUCGCCGGAACUGC |
| | | AGGACGAAAUCGGAACAGCAUUCUCGCUGUUCAAGACAGACGAAGACAUCACAGGAAGACUGAAGGACAGAAUCCAG |
| | | CCGGAAAUCCUGGAAGCACUGCUGAAGCACAUCUCGUUCGACAAGUUCGUCCAGAUCUCGCUGAAGGCACUGAGAAG |
| | | AAUCGUCCCGCUGAUGGAACAGGGAAAGAGAUACGACGAAGCAUGCGCAGAAAUCUACGGAGACCACUACGGAAAGA |
| | | AGAACACAGAAGAAAAGAUCUACCUGCCGCCGAUCCCGGCAGACGAAAUCAGAAACCCGGUCGUCCUGAGAGCACUGU |
| | | CGCAGGCAAGAAAGGUCAUCAACGGAGUCGUCAGAAGAUACGGAUCGCCGGCAAGAAUCCACAUCGAAACAGCAAGA |
| | | GAAGUCGGAAAGUCGUUCAAGGACAGAAAGGAAAUCGAAAAGAGACAGGAAGAAAACAGAAAGGACAGAGAAAAGGC |
| | | AGCAGCAAAGUUCAGAGAAUACUUCCCGAACUUCGUCGGAGAACCGAAGUCGAAGGACAUCCUGAAGCUGAGACUGU |
| | | ACGAACAGCAGCACGGAAAGUGCCUGUACUCGGGAAAGGAAAUCAACCUGGGAAGACUGAACGAAAAGGGAUACGUC |
| | | GAAAUCGACCACGCACUGCCGUUCUCGAGAACAUGGGACGACUCGUUCAACAACAAGGUCCUGGUCCUGGGAUCGGAA |
| | | AACCAGAACAAGGGAAACCAGACACCGUACGAAUACUUCAACGGAAAGGACAACUCGAGAGAAUGGCAGGAAUUCAA |
| | | GGCAAGAGUCGAAACAUCGAGAUUCCCGAGAUCGAAGAAGCAGAGAAUCCUGCUGCAGAAGUUCGACGAAGACGGAU |
| | | UCAAGGAAAGAAACCUGAACGACACAAGAUACGUCAACAGAUUCCUGUGCCAGUUCGUCGCAGACAGAAUGAGACUG |
| | | ACAGGAAAGGGAAAGAAGAGAGUCUUCGCAUCGAACGGACAGAUCACAAACCUGCUGAGAGGAUUCUGGGGACUGAG |
| | | AAAGGUCAGAGCAGAAAACGACAGACACCACGCACUGGACGCAGUCGUCGUCGCAUGCUCGACAGUCGCAAUGCAGCA |
| | | GAAGAUCACAAGAUUCGUCAGAUACAAGGAAAUGAACGCAUUCGACGGAAAGACAAUCGACAAGGAAACAGGAGAAG |
| | | UCCUGCACCAGAAGACACACUUCCCGCAGCCGUGGGAAUUCUUCGCACAGGAAGUCAUGAUCAGAGUCUUCGGAAAGC |
| | | CGGACGGAAAGCCGGAAUUCGAAGAAGCAGACACACUGGAAAAGCUGAGAACACUGCUGGCAGAAAAGCUGUCGUCG |
| | | AGACCGGAAGCAGUCCACGAAUACGUCACACCGCUGUUCGUCUCGAGAGCACCGAACAGAAAGAUGUCGGGACAGGG |
| | | ACACAUGGAAACAGUCAAGUCGGCAAAGAGACUGGACGAAGGAGUCUCGGUCCUGAGAGUCCCGCUGACACAGCUGA |
| | | AGCUGAAGGACCUGGAAAAGAUGGUCAACAGAGAAAGAGAACCGAAGCUGUACGAAGCACUGAAGGCAAGACUGGAA |
| | | GCACACAAGGACGACCCGGCAAAGGCAUUCGCAGAACCGUUCUACAAGUACGACAAGGCAGGAAACAGAACACAGCAG |
| | | GUCAAGGCAGUCAGAGUCGAACAGGUCCAGAAGACAGGAGUCUGGGUCAGAAACCACAACGGAAUCGCAGACAACGC |
| | | AACAAUGGUCAGAGUAGACGUCUUCGAAAAGGGAGACAAGUACUACCUGGUCCCGAUCUACUCGUGGCAGGUCGCAA |
| | | AGGGAAUCCUGCCGGACAGAGCAGUCGUCCAGGGAAAGGACGAAGAAGACUGGCAGCUGAUCGACGACUCGUUCAAC |
| | | UUCAAGUUCUCGCUGCACCCGAACGACCUGGUCGAAGUCAUCACAAAGAAGGCAAGAAUGUUCGGAUACUUCGCAUC |
| | | GUGCCACAGAGGAACAGGAAACAUCAACAUCAGAAUCCACGACCUGGACCACAAGAUCGGAAAGAACGGAAUCCUGG |
| | | AAGGAAUCGGAGUCAAGACAGCACUGUCGUUCCAGAAGUACCAGAUCGACGAACUGGGAAAGGAAAUCAGACCGUGC |
| | | AGACUGAAGAAGAGACCGCCGGUCAGAUCCGGAAAGAGAACAGCAGACGGAUCGGAAUUCGAAUCGCCGAAGAAGAA |
| | | GAGAAAGGUCGAAUGA |
| 103 | WT | MDKKYSIGLDIGTNSVGWAVITDEYKVPSKKFKVLGNTDRHSIKKNLIGALLFDSGETAEATRLKRTARRRYTRRKNRICYLQEI |
| | SpyCas9- | FSNEMAKVDDSFFHRLEESFLVEEDKKHERHPIFGNIVDEVAYHEKYPTIYHLRKKLVDSTDKADLRLIYLALAHMIKFRGHFLI |
| | WT | EGDLNPDNSDVDKLFIQLVQTYNQLFEENPINASGVDAKAILSARLSKSRRLENLIAQLPGEKKNGLFGNLIALSLGLTPNFKSNF |
| | NmeCas9 | DLAEDAKLQLSKDTYDDDLDNLLAQIGDQYADLFLAAKNLSDAILLSDILRVNTEITKAPLSASMIKRYDEHHQDLTLLKALVR |
| | fusion | QQLPEKYKEIFFDQSKNGYAGYIDGGASQEEFYKFIKPILEKMDGTEELLVKLNREDLLRKQRTFDNGSIPHQIHLGELHAILRRQ |
| | ORF | EDFYPFLKDNREKIEKILTFRIPYYVGPLARGNSRFAWMTRKSEETITPWNFEEVVDKGASAQSFIERMTNFDKNLPNEKVLPKH |
| | | SLLYEYFTVYNELTKVKYVTEGMRKPAFLSGEQKKAIVDLLFKTNRKVTVKQLKEDYFKKIECFDSVEISGVEDRFNASLGTYH |
| | | DLLKIIKDKDFLDNEENEDILEDIVLTLTLFEDREMIEERLKTYAHLFDDKVMKQLKRRRYTGWGRLSRKLINGIRDKQSGKTIL |
| | | DFLKSDGFANRNFMQLIHDDSLTFKEDIQKAQVSGQGDSLHEHIANLAGSPAIKKGILQTVKVVDELVKVMGRHKPENIVIEMA |
| | | RENQTTQKGQKNSRERMKRIEEGIKELGSQILKEHPVENTQLQNEKLYLYYLQNGRDMYVDQELDINRLSDYDVDHIVPQSFL |
| | | KDDSIDNKVLTRSDKNRGKSDNVPSEEVVKKMKNYWRQLLNAKLITQRKFDNLTKAERGGLSELDKAGFIKRQLVETRQITKH |
| | | VAQILDSRMNTKYDENDKLIREVKVITLKSKLVSDFRKDFQFYKVREINNYHHAHDAYLNAVVGTALIKKYPKLESEFVYGDY |
| | | KVYDVRKMIAKSEQEIGKATAKYFFYSNIMNFFKTEITLANGEIRKRPLIETNGETGEIVWDKGRDFATVRKVLSMPQVNIVKKT |
| | | EVQTGGFSKESILPKRNSDKLIARKKDWDPKKYGGFDSPTVAYSVLVVAKVEKGKSKKLKSVKELLGITIMERSSFEKNPIDFLE |
| | | AKGYKEVKKDLIIKLPKYSLFELENGRKRMLASAGELQKGNELALPSKYVNFLYLASHYEKLKGSPEDNEQKQLFVEQHKHYL |
| | | DEIIEQISEFSKRVILADANLDKVLSAYNKHRDKPIREQAENIIHLFTLTNLGAPAAFKYFDTTIDRKRYTSTKEVLDATLIHQSITG |
| | | LYETRIDLSQLGGDGAPESATESGGTSTESEGSAGTSTESEGSAGSAGSTSTEEGTSTESEGSAGTSTESEGSAGTSESATESGGTS |
| | | TESEGSSSGAAFKPNSINYILGLDIGIASVGWAMVEIDEEENPIRLIDLGVRVFERAEVPKTGDSLAMARRLARSVRRLTRRRAHR |
| | | LLRTRRLLKREGVLQAANFDENGLIKSLPNTPWQLRAAALDRKLTPLEWSAVLLHLIKHRGYLSQRKNEGETADKELGALLKG |
| | | VAGNAHALQTGDFRTPAELALNKFEKESGHIRNQRSDYSHTFSRKDLQAELILLFEKQKEFGNPHVSGGLKEGIETLLMTQRPA |
| | | LSGDAVQKMLGHCTFEPAEPKAAKNTYTAERFIWLTKLNNLRILEQGSERPLTDTERATLMDEPYRKSKLTYAQARKLLGLED |
| | | TAFFKGLRYGKDNAEASTLMEMKAYHAISRALEKEGLKDKKSPLNLSPELQDEIGTAFSLFKTDEDITGRLKDRIQPEILEALLK |
| | | HISFDKFVQISLKALRRIVPLMEQGKRYDEACAEIYGDHYGKKNTEEKIYLPPIPADEIRNPVVLRALSQARKVINGVVRRYGSP |
| | | ARIHIETAREVGKSFKDRKEIEKRQEENRKDREKAAAKFREYFPNFVGEPKSKDILKLRLYEQQHGKCLYSGKEINLGRLNEKG |
| | | YVEIDHALPFSRTWDDSFNNKVLVLGSENQNKGNQTPYEYFNGKDNSREWQEFKARVETSRFPRSKKQRILLQKFDEDGFKER |
| | | NLNDTRYVNRFLCQFVADRMRLTGKGKKRVFASNGQITNLLRGFWGLRKVRAENDRHHALDAVVVACSTVAMQQKITRFVR |
| | | YKEMNAFDGKTIDKETGEVLHQKTHFPQPWEFFAQEVMIRVFGKPDGKPEFEEADTLEKLRTLLAEKLSSRPEAVHEYVTPLFV |
| | | SRAPNRKMSGQGHMETVKSAKRLDEGVSVLRVPLTQLKLKDLEKMVNREREPKLYEALKARLEAHKDDPAKAFAEPFYKYD |
| | | KAGNRTQQVKAVRVEQVQKTGVWVRNHNGIADNATMVRVDVFEKGDKYYLVPIYSWQVAKGILPDRAVVQGKDEEDWQLI |
| | | DDSFNFKFSLHPNDLVEVITKKARMFGYFASCHRGTGNINIRIHDLDHKIGKNGILEGIGVKTALSFQKYQIDELGKEIRPCRLKK |
| | | RPPVRSGKRTADGSEFESPKKKRKVE* |
| 104 | Spy | GGCGACAAGAAGUACUCCAUCGGCCUGGACAUCGGCACCAACUCCGUGGGCUGGGCCGUGAUCACCGACGAGUACAAGGUGCCCUCCAAGA |
| | Cas9 | AGUUCAAGGUGCUGGGCAACACCGACCGGCACUCCAUCAAGAAGAACCUGAUCGGCGCCCUGCUGUUCGACUCCGGCGAGACCGCCGAGGC |
| | R133K | CACCCGGCUGAAGCGGACCGCCCGGCGGCGGUACACCCGGCGGAAGAACCGGAUCUGCUACCUGCAGGAGAUCUUCUCCAACGAGAUGGCC |
| | nucleic | AAGGUGGACGACUCCUUCUUCCACCGGCUGGAGGAGUCCUUCCUGGUGGAGGAGGACAAGAAGCACGAGCGGCACCCCAUCUUCGGCAACA |
| | acid | UCGUGGACGAGGUGGCCUACCACGAGAAGUACCCCACCAUCUACCACCUGCGGAAGAAGCUGGUGGACUCCACCGACAAGGCCGACCUGCG |
| | coding | GCUGAUCUACCUGGCCCUGGCCCACAUGAUCAAGUUCCGGGGCCACUUCCUGAUCGAGGGCGACCUGAACCCCGACAACUCCGACGUGGAC |
| | sequence | AAGCUGUUCAUCCAGCUGGUGCAGACCUACAACCAGCUGUUCGAGGAGAACCCCAUCAACGCCUCCGGCGUGGACGCCAAGGCCAUCCUGU |
| | without | CCGCCCGGCUGUCCAAGUCCCGGCGGCUGGAGAACCUGAUCGCCCAGCUGCCCGGCGAGAAGAAGAACGGCCUGUUCGGCAACCUGAUCGC |
| | start or | CCUGUCCCUGGGCCUGACCCCCAACUUCAAGUCCAACUUCGACCUGGCCGAGGACGCCAAGCUGCAGCUGUCCAAGGACACCUACGACGAC |
| | stop | GACCUGGACAACCUGCUGGCCCAGAUCGGCGACCAGUACGCCGACCUGUUCCUGGCCGCCAAGAACCUGUCCGACGCCAUCCUGCUGUCCG |
| | codons | ACAUCCUGCGGGUGAACACCGAGAUCACCAAGGCCCCCCUGUCCGCCUCCAUGAUCAAGCGGUACGACGAGCACCACCAGGACCUGACCCU |
| | suitable | GCUGAAGGCCCUGGUGCGGCAGCAGCUGCCCGAGAAGUACAAGGAGAUCUUCUUCGACCAGUCCAAGAACGGCUACGCCGGCUACAUCGAC |
| | for | GGCGGCGCCUCCCAGGAGGAGUUCUACAAGUUCAUCAAGCCCAUCCUGGAGAAGAUGGACGGCACCGAGGAGCUGCUGGUGAAGCUGAACC |
| | fusion | GGGAGGACCUGCUGCGGAAGCAGCGGACCUUCGACAACGGCUCCAUCCCCCACCAGAUCCACCUGGGCGAGCUGCACGCCAUCCUGCGGCG |
| | constructs | GCAGGAGGACUUCUACCCCUUCCUGAAGGACAACCGGGAGAAGAUCGAGAAGAUCCUGACCUUCCGGAUCCCCUACUACGUGGGCCCCCUG |
| | | GCCCGGGGCAACUCCCGGUUCGCCUGGAUGACCCGGAAGUCCGAGGAGACCAUCACCCCCUGGAACUUCGAGGAGGUGGUGGACAAGGGCG |
| | | CCUCCGCCCAGUCCUUCAUCGAGCGGAUGACCAACUUCGACAAGAACCUGCCCAACGAGAAGGUGCUGCCCAAGCACUCCCUGCUGUACGA |
| | | GUACUUCACCGUGUACAACGAGCUGACCAAGgugaaguacgugaccgagggcaugcggaagcccgccuuccuguccggcgagcagaagaag |
| | | gccaucguggaccugcuguucaagaccaaccggaaggugaccgugaagcagcugaaggaggacuacuucaagaagaucgagugcuucgacu |
| | | ccguggagaucuccggcguggaggaccgguucaacgccucccugggcaccuaccacgaccugcugaagaucaucaaggacaaggacuuccu |
| | | ggacaacgaggagaacgaggacauccuggaggacaucgugcugacccugacccuguucgaggaccgggagaugaucgaggagcggcugaag |
| | | accuacgcccaccuguucgacgacaaggugaugaagcagcugaagcggcggcgguacaccggcuggggccggcugucccggaagcugauca |
| | | acggcauccgggacaagcaguccggcaagaccauccuggacuuccugaaguccgacggcuucgccaaccggaacuucaugcagcugaucca |
| | | cgacgacucccugaccuucaaggaggacauccagaaggcccagguguccggccagggcgacucccugcacgagcacaucgccaaccuggcc |
| | | ggcucccccgccaucaagaagggcauccugcagaccgugaaggugguggacgagcuggugaaggugaugggccggcacaagcccgagaaca |
| | | ucgugaucgagauggcccgggagaaccagaccacccagaagggccagaagaacucccgggagcggaugaagcggaucgaggagggcaucaa |
| | | ggagcugggcucccagauccugaaggagcaccccguggagaacacccagcugcagaacgagaagcuguaccuguacuaccugcagaacggc |
| | | cgggacauguacguggaccaggagcuggacaucaaccggcuguccgacuacgacguggaccacaucgugccccaguccuuccugaaggacg |
| | | acuccaucgacaacaaggugcugacccgguccgacaagaaccggggcaaguccgacaacgugcccuccgaggagguggugaagaagaugaa |
| | | gaacuacuggcggcagcugcugaacgccaagcugaucacccagcggaaguucgacaaccugaccaaggccgagcggCggggccuguccgag |
| | | cuggacaaggccggcuucaucaagcggcagcugguggagacccggcagaucaccaagcacguggcccagauccuggacucccggaugaaca |
| | | ccaaguacgacgagaacgacaagcugauccgggaggugaaggugaucacccugaaguccaagcugguguccgacuuccggaaggacuucca |
| | | guucuacaaggugcgggagaucaacaacuaccaccacgcccacgacgccuaccugaacgccguggugggcaccgcccugaucaagaaguac |
| | | cccaagcuggaguccgaguucguguacggcgacuacaagguguacgacgugcggaagaugaucgccaaguccgagcaggagaucggcaagg |
| | | ccaccgccaaguacuucuucuacuccaacaucaugaacuucuucaagaccgagaucacccuggccaacggcgagauccggaagcggccccu |
| | | gaucgagaccaacggcgagaccggcgagaucgugugggacaagggccgggacuucgccaccgugcggaaggugcuguccaugccccaggug |
| | | aacaucgugaagaagaccgaggugcagaccggcggcuucuccaaggaguccauccugcccaagcggaacuccgacaagcugaucgcccgga |
| | | agaaggacugggaccccaagaaguacggcggcuucgacucccccaccguggccuacuccgugcuggugguggccaagguggagaagggcaa |
| | | guccaagaagcugaaguccgugaaggagcugcugggcaucaccaucauggagcgguccuccuucgagaagaaccccaucgacuuccuggag |
| | | gccaagggcuacaaggaggugaagaaggaccugaucaucaagcugcccaaguacucccuguucgagcuggagaacggccggaagcggaugc |
| | | uggccuccgccggcgagcugcagaagggcaacgagcuggcccugcccuccaaguacgugaacuuccuguaccuggccucccacuacgagaa |
| | | gcugaagggcucccccgaggacaacgagcagaagcagcuguucguggagcagcacaagcacuaccuggacgagaucaucgagcagaucucc |
| | | gaguucuccaagcgggugauccuggccgacgccaaccuggacaaggugcuguccgccuacaacaagcaccgggacaagcccauccgggagc |
| | | aggccgagaacaucauccaccuguucacccugaccaaccugggcgcccccgccgccuucaaguacuucgacaccaccaucgacAAGaagcg |
| | | guacaccuccaccaaggaggugcuggacgccacccugauccaccaguccaucaccggccuguacgagacccggaucgaccugucccagcug |
| | | ggcggcgac |
| 105 | Amino | GDKKYSIGLDIGTNSVGWAVITDEYKVPSKKFKVLGNTDRHSIKKNLIGALLFDSGETAEATRLKRTARRRYTRRKNRICYLQEIFSNEMA |
| | acid | KVDDSFFHRLEESFLVEEDKKHERHPIFGNIVDEVAYHEKYPTIYHLRKKLVDSTDKADLRLIYLALAHMIKFRGHFLIEGDLNPDNSDVD |
| | sequence | KLFIQLVQTYNQLFEENPINASGVDAKAILSARLSKSRRLENLIAQLPGEKKNGLFGNLIALSLGLTPNFKSNFDLAEDAKLQLSKDTYDD |
| | for | DLDNLLAQIGDQYADLFLAAKNLSDAILLSDILRVNTEITKAPLSASMIKRYDEHHQDLTLLKALVRQQLPEKYKEIFFDQSKNGYAGYID |
| | SpyCas9 | GGASQEEFYKFIKPILEKMDGTEELLVKLNREDLLRKQRTFDNGSIPHQIHLGELHAILRRQEDFYPFLKDNREKIEKILTFRIPYYVGPL |
| | R1333K | ARGNSRFAWMTRKSEETITPWNFEEVVDKGASAQSFIERMTNFDKNLPNEKVLPKHSLLYEYFTVYNELTKVKYVTEGMRKPAFLSGEQKK |
| | suitable | AIVDLLFKTNRKVTVKQLKEDYFKKIECFDSVEISGVEDRFNASLGTYHDLLKIIKDKDFLDNEENEDILEDIVLTLTLFEDREMIEERLK |
| | for | TYAHLFDDKVMKQLKRRRYTGWGRLSRKLINGIRDKQSGKTILDFLKSDGFANRNFMQLIHDDSLTFKEDIQKAQVSGQGDSLHEHIANLA |
| | fusion | GSPAIKKGILQTVKVVDELVKVMGRHKPENIVIEMARENQTTQKGQKNSRERMKRIEEGIKELGSQILKEHPVENTQLQNEKLYLYYLQNG |
| | constructs | RDMYVDQELDINRLSDYDVDHIVPQSFLKDDSIDNKVLTRSDKNRGKSDNVPSEEVVKKMKNYWRQLLNAKLITQRKFDNLTKAERGGLSE |
| | | LDKAGFIKRQLVETRQITKHVAQILDSRMNTKYDENDKLIREVKVITLKSKLVSDFRKDFQFYKVREINNYHHAHDAYLNAVVGTALIKKY |
| | | PKLESEFVYGDYKVYDVRKMIAKSEQEIGKATAKYFFYSNIMNFFKTEITLANGEIRKRPLIETNGETGEIVWDKGRDFATVRKVLSMPQV |
| | | NIVKKTEVQTGGFSKESILPKRNSDKLIARKKDWDPKKYGGFDSPTVAYSVLVVAKVEKGKSKKLKSVKELLGITIMERSSFEKNPIDFLE |
| | | AKGYKEVKKDLIIKLPKYSLFELENGRKRMLASAGELQKGNELALPSKYVNFLYLASHYEKLKGSPEDNEQKQLFVEQHKHYLDEIIEQIS |
| | | EFSKRVILADANLDKVLSAYNKHRDKPIREQAENIIHLFTLTNLGAPAAFKYFDTTIDKKRYTSTKEVLDATLIHQSITGLYETRIDLSQL |
| | | GGD |
| 106 | WT | AUGGCAGCAUUCAAGCCGAACUCGAUCAACUACAUCCUGGGACUGGACAUCGGAAUCGCAUCGGUCGGAUGGGCAAU |
| | Nme1 | GGUCGAAAUCGACGAAGAAGAAAACCCGAUCAGACUGAUCGACCUGGGAGUCAGAGUCUUCGAAAGAGCAGAAGUCC |
| | Cas9 | CGAAGACAGGAGACUCGCUGGCAAUGGCAAGAAGACUGGCAAGAUCGGUCAGAAGACUGACAAGAAGAAGAGCACAC |
| | coding | AGACUGCUGAGAACAAGAAGACUGCUGAAGAGAGAAGGAGUCCUGCAGGCAGCAAACUUCGACGAAAACGGACUGAU |
| | sequence | CAAGUCGCUGCCGAACACACCGUGGCAGCUGAGAGCAGCAGCACUGGACAGAAAGCUGACACCGCUGGAAUGGUCGGC |
| | | AGUCCUGCUGCACCUGAUCAAGCACAGAGGAUACCUGUCGCAGAGAAAGAACGAAGGAGAAACAGCAGACAAGGAAC |
| | | UGGGAGCACUGCUGAAGGGAGUCGCAGGAAACGCACACGCACUGCAGACAGGAGACUUCAGAACACCGGCAGAACUG |
| | | GCACUGAACAAGUUCGAAAAGGAAUCGGGACACAUCAGAAACCAGAGAUCGGACUACUCGCACACAUUCUCGAGAAA |
| | | GGACCUGCAGGCAGAACUGAUCCUGCUGUUCGAAAAGCAGAAGGAAUUCGGAAACCCGCACGUCUCGGGAGGACUGA |
| | | AGGAAGGAAUCGAAACACUGCUGAUGACACAGAGACCGGCACUGUCGGGAGACGCAGUCCAGAAGAUGCUGGGACAC |
| | | UGCACAUUCGAACCGGCAGAACCGAAGGCAGCAAAGAACACAUACACAGCAGAAAGAUUCAUCUGGCUGACAAAGCU |
| | | GAACAACCUGAGAAUCCUGGAACAGGGAUCGGAAAGACCGCUGACAGACACAGAAAGAGCAACACUGAUGGACGAAC |
| | | CGUACAGAAAGUCGAAGCUGACAUACGCACAGGCAAGAAAGCUGCUGGGACUGGAAGACACAGCAUUCUUCAAGGGA |
| | | CUGAGAUACGGAAAGGACAACGCAGAAGCAUCGACACUGAUGGAAAUGAAGGCAUACCACGCAAUCUCGAGAGCACU |
| | | GGAAAAGGAAGGACUGAAGGACAAGAAGUCGCCGCUGAACCUGUCGCCGGAACUGCAGGACGAAAUCGGAACAGCAU |
| | | UCUCGCUGUUCAAGACAGACGAAGACAUCACAGGAAGACUGAAGGACAGAAUCCAGCCGGAAAUCCUGGAAGCACUG |
| | | CUGAAGCACAUCUCGUUCGACAAGUUCGUCCAGAUCUCGCUGAAGGCACUGAGAAGAAUCGUCCCGCUGAUGGAACA |
| | | GGGAAAGAGAUACGACGAAGCAUGCGCAGAAAUCUACGGAGACCACUACGGAAAGAAGAACACAGAAGAAAAGAUCU |
| | | ACCUGCCGCCGAUCCCGGCAGACGAAAUCAGAAACCCGGUCGUCCUGAGAGCACUGUCGCAGGCAAGAAAGGUCAUCA |
| | | ACGGAGUCGUCAGAAGAUACGGAUCGCCGGCAAGAAUCCACAUCGAAACAGCAAGAGAAGUCGGAAAGUCGUUCAAG |
| | | GACAGAAAGGAAAUCGAAAAGAGACAGGAAGAAAACAGAAAGGACAGAGAAAAGGCAGCAGCAAAGUUCAGAGAAUA |
| | | CUUCCCGAACUUCGUCGGAGAACCGAAGUCGAAGGACAUCCUGAAGCUGAGACUGUACGAACAGCAGCACGGAAAGU |
| | | GCCUGUACUCGGGAAAGGAAAUCAACCUGGGAAGACUGAACGAAAAGGGAUACGUCGAAAUCGACCACGCACUGCCG |
| | | UUCUCGAGAACAUGGGACGACUCGUUCAACAACAAGGUCCUGGUCCUGGGAUCGGAAAACCAGAACAAGGGAAACCA |
| | | GACACCGUACGAAUACUUCAACGGAAAGGACAACUCGAGAGAAUGGCAGGAAUUCAAGGCAAGAGUCGAAACAUCGA |
| | | GAUUCCCGAGAUCGAAGAAGCAGAGAAUCCUGCUGCAGAAGUUCGACGAAGACGGAUUCAAGGAAAGAAACCUGAAC |
| | | GACACAAGAUACGUCAACAGAUUCCUGUGCCAGUUCGUCGCAGACAGAAUGAGACUGACAGGAAAGGGAAAGAAGAG |
| | | AGUCUUCGCAUCGAACGGACAGAUCACAAACCUGCUGAGAGGAUUCUGGGGACUGAGAAAGGUCAGAGCAGAAAACG |
| | | ACAGACACCACGCACUGGACGCAGUCGUCGUCGCAUGCUCGACAGUCGCAAUGCAGCAGAAGAUCACAAGAUUCGUCA |
| | | GAUACAAGGAAAUGAACGCAUUCGACGGAAAGACAAUCGACAAGGAAACAGGAGAAGUCCUGCACCAGAAGACACAC |
| | | UUCCCGCAGCCGUGGGAAUUCUUCGCACAGGAAGUCAUGAUCAGAGUCUUCGGAAAGCCGGACGGAAAGCCGGAAUU |
| | | CGAAGAAGCAGACACACUGGAAAAGCUGAGAACACUGCUGGCAGAAAAGCUGUCGUCGAGACCGGAAGCAGUCCACG |
| | | AAUACGUCACACCGCUGUUCGUCUCGAGAGCACCGAACAGAAAGAUGUCGGGACAGGGACACAUGGAAACAGUCAAG |
| | | UCGGCAAAGAGACUGGACGAAGGAGUCUCGGUCCUGAGAGUCCCGCUGACACAGCUGAAGCUGAAGGACCUGGAAAA |
| | | GAUGGUCAACAGAGAAAGAGAACCGAAGCUGUACGAAGCACUGAAGGCAAGACUGGAAGCACACAAGGACGACCCGG |
| | | CAAAGGCAUUCGCAGAACCGUUCUACAAGUACGACAAGGCAGGAAACAGAACACAGCAGGUCAAGGCAGUCAGAGUC |
| | | GAACAGGUCCAGAAGACAGGAGUCUGGGUCAGAAACCACAACGGAAUCGCAGACAACGCAACAAUGGUCAGAGUAGA |
| | | CGUCUUCGAAAAGGGAGACAAGUACUACCUGGUCCCGAUCUACUCGUGGCAGGUCGCAAAGGGAAUCCUGCCGGACA |
| | | GAGCAGUCGUCCAGGGAAAGGACGAAGAAGACUGGCAGCUGAUCGACGACUCGUUCAACUUCAAGUUCUCGCUGCAC |
| | | CCGAACGACCUGGUCGAAGUCAUCACAAAGAAGGCAAGAAUGUUCGGAUACUUCGCAUCGUGCCACAGAGGAACAGG |
| | | AAACAUCAACAUCAGAAUCCACGACCUGGACCACAAGAUCGGAAAGAACGGAAUCCUGGAAGGAAUCGGAGUCAAGA |
| | | CAGCACUGUCGUUCCAGAAGUACCAGAUCGACGAACUGGGAAAGGAAAUCAGACCGUGCAGACUGAAGAAGAGACCG |
| | | CCGGUCAGAUCCGGAAAGAGAACAGCAGACGGAUCGGAAUUCGAAUCGCCGAAGAAGAAGAGAAAGGUCGAAUGA |
| 107 | WT | MAAFKPNSINYILGLDIGIASVGWAMVEIDEEENPIRLIDLGVRVFERAEVPKTGDSLAMARRLARSVRRLTRRRAHRLLRTRRL |
| | Nme1 | LKREGVLQAANFDENGLIKSLPNTPWQLRAAALDRKLTPLEWSAVLLHLIKHRGYLSQRKNEGETADKELGALLKGVAGNAH |
| | Cas9 | ALQTGDFRTPAELALNKFEKESGHIRNQRSDYSHTFSRKDLQAELILLFEKQKEFGNPHVSGGLKEGIETLLMTQRPALSGDAVQ |
| | amino | KMLGHCTFEPAEPKAAKNTYTAERFIWLTKLNNLRILEQGSERPLTDTERATLMDEPYRKSKLTYAQARKLLGLEDTAFFKGLR |
| | acid | YGKDNAEASTLMEMKAYHAISRALEKEGLKDKKSPLNLSPELQDEIGTAFSLFKTDEDITGRLKDRIQPEILEALLKHISFDKFVQ |
| | sequence | ISLKALRRIVPLMEQGKRYDEACAEIYGDHYGKKNTEEKIYLPPIPADEIRNPVVLRALSQARKVINGVVRRYGSPARIHIETARE |
| | | VGKSFKDRKEIEKRQEENRKDREKAAAKFREYFPNFVGEPKSKDILKLRLYEQQHGKCLYSGKEINLGRLNEKGYVEIDHALPF |
| | | SRTWDDSFNNKVLVLGSENQNKGNQTPYEYFNGKDNSREWQEFKARVETSRFPRSKKQRILLQKFDEDGFKERNLNDTRYVN |
| | | RFLCQFVADRMRLTGKGKKRVFASNGQITNLLRGFWGLRKVRAENDRHHALDAVVVACSTVAMQQKITRFVRYKEMNAFDG |
| | | KTIDKETGEVLHQKTHFPQPWEFFAQEVMIRVFGKPDGKPEFEEADTLEKLRTLLAEKLSSRPEAVHEYVTPLFVSRAPNRKMS |
| | | GQGHMETVKSAKRLDEGVSVLRVPLTQLKLKDLEKMVNREREPKLYEALKARLEAHKDDPAKAFAEPFYKYDKAGNRTQQV |
| | | KAVRVEQVQKTGVWVRNHNGIADNATMVRVDVFEKGDKYYLVPIYSWQVAKGILPDRAVVQGKDEEDWQLIDDSFNFKFSL |
| | | HPNDLVEVITKKARMFGYFASCHRGTGNINIRIHDLDHKIGKNGILEGIGVKTALSFQKYQIDELGKEIRPCRLKKRPPVRSGKRT |
| | | ADGSEFESPKKKRKVE* |
| 108 | Nme2 | auggccgccuucaagcccaaccccaucaacuacauccugggccuggacaucggcaucgccuccgugggcugggccaugguggagaucgacg |
| | Cas9 | aggaggagaaccccauccggcugaucgaccugggcgugcggguguucgagcgggccgaggugcccaagaccggcgacucccuggccauggc |
| | coding | ccggcggcuggcccgguccgugcggcggcugacccggcggcgggcccaccggcugcugcgggcccggcggcugcugaagcgggagggcgug |
| | sequence | cugcaggccgccgacuucgacgagaacggccugaucaagucccugcccaacacccccuggcagcugcgggccgccgcccuggaccggaagc |
| | | ugaccccccuggagugguccgccgugcugcugcaccugaucaagcaccggggcuaccugucccagcggaagaacgagggcgagaccgccga |
| | | caaggagcugggcgcccugcugaagggcguggccaacaacgcccacgcccugcagaccggcgacuuccggacccccgccgagcuggcccug |
| | | aacaaguucgagaaggaguccggccacauccggaaccagcgggCggacuacucccacaccuucucccggaaggaccugcaggccgagcuga |
| | | uccugcuguucgagaagcagaaggaguucggcaacccccacguguccggggccugaaggagcggcaucgagacccugcugaugacccagcg |
| | | gcccgcccuguccggcgacgccgugcagaagaugcugggccacugcaccuucgagcccgccgagcccaaggccgccaagaacaccuacacc |
| | | gccgagcgguucaucuggcugaccaagcugaacaaccugcggauccuggagcagggcuccgagcggccccugaccgacaccgagggcgcca |
| | | cccugauggacgagcccuaccggaaguccaagcugaccuacgcccaggcccggaagcugcugggccuggaggacaccgccuucuucaaggg |
| | | ccugcgguacggcaaggacaacgccgaggccuccacccugauggagaugaaggccuaccacgccaucucccgggcccuggagaaggagggc |
| | | cugaaggacaagaaguccccccugaaccuguccuccgagcugcaggacgagaucggcaccgccuucucccuguucaagaccgacgaggaca |
| | | ucaccggccggcugaaggaccgggugcagcccgagauccuggaggcccugcugaagcacaucuccuucgacaaguucgugcagaucucccu |
| | | gaaggcccugcggcggaucgugccccugauggagcagggcaagcgguacgacgaggccugcgccgagaucuacggcgaccacuacggcaag |
| | | aagaacaccgaggagaagaucuaccugccccccauccccgccgacgagauccggaaccccguggugcugcgggcccugucccaggcccgga |
| | | aggugaucaacggcguggugcggcgguacggcucccccgcccggauccacaucgagaccgcccgggaggugggcaaguccuucaaggaccg |
| | | gaaggagaucgagaagcggcaggaggagaaccggaaggaccgggagaaggccgccgccaaguuccgggaguacuuccccaacuucgugggc |
| | | gagcccaaguccaaggacauccugaagcugcggcuguacgagcagcagcacggcaagugccuguacuccggcaaggagaucaaccuggugc |
| | | ggcugaacgagaagggcuacguggagaucgaccacgcccugcccuucucccggaccugggacgacuccuucaacaacaaggugcuggugcu |
| | | gggcuccgagaaccagaacaagggcaaccagacccccuacgaguacuucaacggcaaggacaacucccgggaguggcaggaguucaaggcc |
| | | cggguggagaccucccgguucccccgguccaagaagcagcggauccugcugcagaaguucgacgaggacggcuucaaggagugcaaccuga |
| | | acgacacccgguacgugaaccgguuccugugccaguucguggccgaccacauccugcugaccggcaaggcgcaaggggcgguguucgccuc |
| | | caacggccagaucaccaaccugcugcggggcuucuggggccugcggaagguggcggccgagaacgaccggcaccacgcccuggacgccgug |
| | | gugguggccugcuccaccguggccaugcagcagaagaucacccgguucgugcgguacaaggagaugaacgccuucgacggcaagaccaucg |
| | | acaaggagaccggcaaggugcugcaccagaagacccacuucccccagcccugggaguuuucgcccaggaggugaugauccgcgguguucgg |
| | | caagcccgacggcaagcccgaguucgaggaggccgacacccccgagaagcugcggacccugcuggccgagaagcuguccucccggcccgag |
| | | gccgugcacgaguacgugaccccccuguucgugucccgggcccccaaccggaagauguccggcgcccacaaggacacccugcgguccgcca |
| | | agcgguucgugaagcacaacgagaagaucuccgugaagcggguguggcugaccgagaucaagcuggccgaccuggagaacauggugaacua |
| | | caagaacggccgggagaucgagcuguacgaggcccugaaggcccggcuggaggccuacggcggcaacgccaagcaggccuucgaccccaag |
| | | gacaaccccuucuacaagaagggcggccagcuggugaaggccgugcggguggagaagacccaggaguccggcgugcugcugaacaagaaga |
| | | acgccuacaccaucgccgacaacggcgacauggugcggguggacguguucugcaagguggacaagaagggcaagaaccaguacuucaucgu |
| | | gcccaucuacgccuggcagguggccgagaacauccugcccgacaucgacugcaagggcuaccggaucgacgacuccuacaccuucugcuuc |
| | | ucccugcacaaguacgaccugaucgccuuccagaaggacgagaaguccaagguggaguucgccuacuacaucaacugcgacuccuccaacg |
| | | gccgguucuaccuggccuggcacgacaagggcuccaaggagcagcaguuccggaucuccacccagaaccuggugcugauccagaaguacca |
| | | ggugaacgagcugggcaaggagauccggcccugccggcugaagaagcggccccccgugcgg |
| 109 | Nme2 | MAAFKPNPINYILGLDIGIASVGWAMVEIDEEENPIRLIDLGVRVFERAEVPKTGDSLAMARRLARSVRRLTRRRAHRLLRARRLLKREGV |
| | Cas9 | LQAADFDENGLIKSLPNTPWQLRAAALDRKLTPLEWSAVLLHLIKHRGYLSQRKNEGETADKELGALLKGVANNAHALQTGDFRTPAELAL |
| | amino | NKFEKESGHIRNQRGDYSHTFSRKDLQAELILLFEKQKEFGNPHVSGGLKEGIETLLMTQRPALSGDAVQKMLGHCTFEPAEPKAAKNTYT |
| | acid | AERFIWLTKLNNLRILEQGSERPLTDTERATLMDEPYRKSKLTYAQARKLLGLEDTAFFKGLRYGKDNAEASTLMEMKAYHAISRALEKEG |
| | sequence | LKDKKSPLNLSSELQDEIGTAFSLFKTDEDITGRLKDRVQPEILEALLKHISFDKFVQISLKALRRIVPLMEQGKRYDEACAEIYGDHYGK |
| | | KNTEEKIYLPPIPADEIRNPVVLRALSQARKVINGVVRRYGSPARIHIETAREVGKSFKDRKEIEKRQEENRKDREKAAAKFREYFPNFVG |
| | | EPKSKDILKLRLYEQQHGKCLYSGKEINLVRLNEKGYVEIDHALPFSRTWDDSFNNKVLVLGSENQNKGNQTPYEYFNGKDNSREWQEFKA |
| | | RVETSRFPRSKKQRILLQKFDEDGFKECNLNDTRYVNRFLCQFVADHILLTGKGKRRVFASNGQITNLLRGFWGLRKVRAENDRHHALDAV |
| | | VVACSTVAMQQKITRFVRYKEMNAFDGKTIDKETGKVLHQKTHFPQPWEFFAQEVMIRVFGKPDGKPEFEEADTPEKLRTLLAEKLSSRPE |
| | | AVHEYVTPLFVSRAPNRKMSGAHKDTLRSAKRFVKHNEKISVKRVWLTEIKLADLENMVNYKNGREIELYEALKARLEAYGGNAKQAFDPK |
| | | DNPFYKKGGQLVKAVRVEKTQESGVLLNKKNAYTIADNGDMVRVDVFCKVDKKGKNQYFIVPIYAWQVAENILPDIDCKGYRIDDSYTFCF |
| | | SLHKYDLIAFQKDEKSKVEFAYYINCDSSNGRFYLAWHDKGSKEQQFRISTQNLVLIQKYQVNELGKEIRPCRLKKRPPVR |
| 110 | WT | AUGGACAAGAAGUACAGCAUCGGACUGGACAUCGGAACAAACAGCGUCGGAUGGGCAGUCAUCACAGACGAAUACAAGGUCCCGAGCAAGA |
| | SpyCas9- | AGUUCAAGGUCCUGGGAAACACAGACAGACACAGCAUCAAGAAGAACCUGAUCGGAGCACUGCUGUUCGACAGCGGAGAAACAGCAGAAGC |
| | ORF | AACAAGACUGAAGAGAACAGCAAGAAGAAGAUACACAAGAAGAAAGAACAGAAUCUGCUACCUGCAGGAAAUCUUCAGCAACGAAAUGGCA |
| | sequence | AAGGUCGACGACAGCUUCUUCCACAGACUGGAAGAAAGCUUCCUGGUCGAAGAAGACAAGAAGCACGAAAGACACCCGAUCUUCGGAAACA |
| | | UCGUCGACGAAGUCGCAUACCACGAAAAGUACCCGACAAUCUACCACCUGAGAAAGAAGCUGGUCGACAGCACAGACAAGGCAGACCUGAG |
| | | ACUGAUCUACCUGGCACUGGCACACAUGAUCAAGUUCAGAGGACACUUCCUGAUCGAAGGAGACCUGAACCCGGACAACAGCGACGUCGAC |
| | | AAGCUGUUCAUCCAGCUGGUCCAGACAUACAACCAGCUGUUCGAAGAAAACCCGAUCAACGCAAGCGGAGUCGACGCAAAGGCAAUCCUGA |
| | | GCGCAAGACUGAGCAAGAGCAGAAGACUGGAAAACCUGAUCGCACAGCUGCCGGGAGAAAAGAAGAACGGACUGUUCGGAAACCUGAUCGC |
| | | ACUGAGCCUGGGACUGACACCGAACUUCAAGAGCAACUUCGACCUGGCAGAAGACGCAAAGCUGCAGCUGAGCAAGGACACAUACGACGAC |
| | | GACCUGGACAACCUGCUGGCACAGAUCGGAGACCAGUACGCAGACCUGUUCCUGGCAGCAAAGAACCUGAGCGACGCAAUCCUGCUGAGCG |
| | | ACAUCCUGAGAGUCAACACAGAAAUCACAAAGGCACCGCUGAGCGCAAGCAUGAUCAAGAGAUACGACGAACACCACCAGGACCUGACACU |
| | | GCUGAAGGCACUGGUCAGACAGCAGCUGCCGGAAAAGUACAAGGAAAUCUUCUUCGACCAGAGCAAGAACGGAUACGCAGGAUACAUCGAC |
| | | GGAGGAGCAAGCCAGGAAGAAUUCUACAAGUUCAUCAAGCCGAUCCUGGAAAAGAUGGACGGAACAGAAGAACUGCUGGUCAAGCUGAACA |
| | | GAGAAGACCUGCUGAGAAAGCAGAGAACAUUCGACAACGGAAGCAUCCCGCACCAGAUCCACCUGGGAGAACUGCACGCAAUCCUGAGAAG |
| | | ACAGGAAGACUUCUACCCGUUCCUGAAGGACAACAGAGAAAAGAUCGAAAAGAUCCUGACAUUCAGAAUCCCGUACUACGUCGGACCGCUG |
| | | GCAAGAGGAAACAGCAGAUUCGCAUGGAUGACAAGAAAGAGCGAAGAAACAAUCACACCGUGGAACUUCGAAGAAGUCGUCGACAAGGGAG |
| | | CAAGCGCACAGAGCUUCAUCGAAAGAAUGACAAACUUCGACAAGAACCUGCCGAACGAAAAGGUCCUGCCGAAGCACAGCCUGCUGUACGA |
| | | AUACUUCACAGUCUACAACGAACUGACAAAGGUCAAGUACGUCACAGAAGGAAUGAGAAAGCCGGCAUUCCUGAGCGGAGAACAGAAGAAG |
| | | GCAAUCGUCGACCUGCUGUUCAAGACAAACAGAAAGGUCACAGUCAAGCAGCUGAAGGAAGACUACUUCAAGAAGAUCGAAUGCUUCGACA |
| | | GCGUCGAAAUCAGCGGAGUCGAAGACAGAUUCAACGCAAGCCUGGGAACAUACCACGACCUGCUGAAGAUCAUCAAGGACAAGGACUUCCU |
| | | GGACAACGAAGAAAACGAAGACAUCCUGGAAGACAUCGUCCUGACACUGACACUGUUCGAAGACAGAGAAAUGAUCGAAGAAAGACUGAAG |
| | | ACAUACGCACACCUGUUCGACGACAAGGUCAUGAAGCAGCUGAAGAGAAGAAGAUACACAGGAUGGGGAAGACUGAGCAGAAAGCUGAUCA |
| | | ACGGAAUCAGAGACAAGCAGAGCGGAAAGACAAUCCUGGACUUCCUGAAGAGCGACGGAUUCGCAAACAGAAACUUCAUGCAGCUGAUCCA |
| | | CGACGACAGCCUGACAUUCAAGGAAGACAUCCAGAAGGCACAGGUCAGCGGACAGGGAGACAGCCUGCACGAACACAUCGCAAACCUGGCA |
| | | GGAAGCCCGGCAAUCAAGAAGGGAAUCCUGCAGACAGUCAAGGUCGUCGACGAACUGGUCAAGGUCAUGGGAAGACACAAGCCGGAAAACA |
| | | UCGUCAUCGAAAUGGCAAGAGAAAACCAGACAACACAGAAGGGACAGAAGAACAGCAGAGAAAGAAUGAAGAGAAUCGAAGAAGGAAUCAA |
| | | GGAACUGGGAAGCCAGAUCCUGAAGGAACACCCGGUCGAAAACACACAGCUGCAGAACGAAAAGCUGUACCUGUACUACCUGCAGAACGGA |
| | | AGAGACAUGUACGUCGACCAGGAACUGGACAUCAACAGACUGAGCGACUACGACGUCGACCACAUCGUCCCGCAGAGCUUCCUGAAGGACG |
| | | ACAGCAUCGACAACAAGGUCCUGACAAGAAGCGACAAGAACAGAGGAAAGAGCGACAACGUCCCGAGCGAAGAAGUCGUCAAGAAGAUGAA |
| | | GAACUACUGGAGACAGCUGCUGAACGCAAAGCUGAUCACACAGAGAAAGUUCGACAACCUGACAAAGGCAGAGAGAGGAGGACUGAGCGAA |
| | | CUGGACAAGGCAGGAUUCAUCAAGAGACAGCUGGUCGAAACAAGACAGAUCACAAAGCACGUCGCACAGAUCCUGGACAGCAGAAUGAACA |
| | | CAAAGUACGACGAAAACGACAAGCUGAUCAGAGAAGUCAAGGUCAUCACACUGAAGAGCAAGCUGGUCAGCGACUUCAGAAAGGACUUCCA |
| | | GUUCUACAAGGUCAGAGAAAUCAACAACUACCACCACGCACACGACGCAUACCUGAACGCAGUCGUCGGAACAGCACUGAUCAAGAAGUAC |
| | | CCGAAGCUGGAAAGCGAAUUCGUCUACGGAGACUACAAGGUCUACGACGUCAGAAAGAUGAUCGCAAAGAGCGAACAGGAAAUCGGAAAGG |
| | | CAACAGCAAAGUACUUCUUCUACAGCAACAUCAUGAACUUCUUCAAGACAGAAAUCACACUGGCAAACGGAGAAAUCAGAAAGAGACCGCU |
| | | GAUCGAAACAAACGGAGAAACAGGAGAAAUCGUCUGGGACAAGGGAAGAGACUUCGCAACAGUCAGAAAGGUCCUGAGCAUGCCGCAGGUC |
| | | AACAUCGUCAAGAAGACAGAAGUCCAGACAGGAGGAUUCAGCAAGGAAAGCAUCCUGCCGAAGAGAAACAGCGACAAGCUGAUCGCAAGAA |
| | | AGAAGGACUGGGACCCGAAGAAGUACGGAGGAUUCGACAGCCCGACAGUCGCAUACAGCGUCCUGGUCGUCGCAAAGGUCGAAAAGGGAAA |
| | | GAGCAAGAAGCUGAAGAGCGUCAAGGAACUGCUGGGAAUCACAAUCAUGGAAAGAAGCAGCUUCGAAAAGAACCCGAUCGACUUCCUGGAA |
| | | GCAAAGGGAUACAAGGAAGUCAAGAAGGACCUGAUCAUCAAGCUGCCGAAGUACAGCCUGUUCGAACUGGAAAACGGAAGAAAGAGAAUGC |
| | | UGGCAAGCGCAGGAGAACUGCAGAAGGGAAACGAACUGGCACUGCCGAGCAAGUACGUCAACUUCCUGUACCUGGCAAGCCACUACGAAAA |
| | | GCUGAAGGGAAGCCCGGAAGACAACGAACAGAAGCAGCUGUUCGUCGAACAGCACAAGCACUACCUGGACGAAAUCAUCGAACAGAUCAGC |
| | | GAAUUCAGCAAGAGAGUCAUCCUGGCAGACGCAAACCUGGACAAGGUCCUGAGCGCAUACAACAAGCACAGAGACAAGCCGAUCAGAGAAC |
| | | AGGCAGAAAACAUCAUCCACCUGUUCACACUGACAAACCUGGGAGCACCGGCAGCAUUCAAGUACUUCGACACAACAAUCGACAGAAAGAG |
| | | AUACACAAGCACAAAGGAAGUCCUGGACGCAACACUGAUCCACCAGAGCAUCACAGGACUGUACGAAACAAGAAUCGACCUGAGCCAGCUG |
| | | GGAGGAGACGGAGGAGGAAGCCCGAAGAAGAAGAGAAAGGUCUAG |
| 111 | WT | MDKKYSIGLDIGTNSVGWAVITDEYKVPSKKFKVLGNTDRHSIKKNLIGALLFDSGETAEATRLKRTARRRYTRRKNRICYLQEIFSNEMA |
| | SpyCas9- | KVDDSFFHRLEESFLVEEDKKHERHPIFGNIVDEVAYHEKYPTIYHLRKKLVDSTDKADLRLIYLALAHMIKFRGHFLIEGDLNPDNSDVD |
| | amino | KLFIQLVQTYNQLFEENPINASGVDAKAILSARLSKSRRLENLIAQLPGEKKNGLFGNLIALSLGLTPNFKSNFDLAEDAKLQLSKDTYDD |
| | acid | DLDNLLAQIGDQYADLFLAAKNLSDAILLSDILRVNTEITKAPLSASMIKRYDEHHQDLTLLKALVRQQLPEKYKEIFFDQSKNGYAGYID |
| | sequence | GGASQEEFYKFIKPILEKMDGTEELLVKLNREDLLRKQRTFDNGSIPHQIHLGELHAILRRQEDFYPFLKDNREKIEKILTFRIPYYVGPL |
| | | ARGNSRFAWMTRKSEETITPWNFEEVVDKGASAQSFIERMTNFDKNLPNEKVLPKHSLLYEYFTVYNELTKVKYVTEGMRKPAFLSGEQKK |
| | | AIVDLLFKTNRKVTVKQLKEDYFKKIECFDSVEISGVEDRFNASLGTYHDLLKIIKDKDFLDNEENEDILEDIVLTLTLFEDREMIEERLK |
| | | TYAHLFDDKVMKQLKRRRYTGWGRLSRKLINGIRDKQSGKTILDFLKSDGFANRNFMQLIHDDSLTFKEDIQKAQVSGQGDSLHEHIANLA |
| | | GSPAIKKGILQTVKVVDELVKVMGRHKPENIVIEMARENQTTQKGQKNSRERMKRIEEGIKELGSQILKEHPVENTQLQNEKLYLYYLQNG |
| | | RDMYVDQELDINRLSDYDVDHIVPQSFLKDDSIDNKVLTRSDKNRGKSDNVPSEEVVKKMKNYWRQLLNAKLITQRKFDNLTKAERGGLSE |
| | | LDKAGFIKRQLVETRQITKHVAQILDSRMNTKYDENDKLIREVKVITLKSKLVSDFRKDFQFYKVREINNYHHAHDAYLNAVVGTALIKKY |
| | | PKLESEFVYGDYKVYDVRKMIAKSEQEIGKATAKYFFYSNIMNFFKTEITLANGEIRKRPLIETNGETGEIVWDKGRDFATVRKVLSMPQV |
| | | NIVKKTEVQTGGFSKESILPKRNSDKLIARKKDWDPKKYGGFDSPTVAYSVLVVAKVEKGKSKKLKSVKELLGITIMERSSFEKNPIDFLE |
| | | AKGYKEVKKDLIIKLPKYSLFELENGRKRMLASAGELQKGNELALPSKYVNFLYLASHYEKLKGSPEDNEQKQLFVEQHKHYLDEIIEQIS |
| | | EFSKRVILADANLDKVLSAYNKHRDKPIREQAENIIHLFTLTNLGAPAAFKYFDTTIDRKRYTSTKEVLDATLIHQSITGLYETRIDLSQL |
| | | GGDGGGSPKKKRKV* |
| 112- | | NQT USED |
| 119 | | |
| 120 | Exemplary | MAAFKPNSINYILGLDIGIASVGWAMVEIDEEENPIRLIDLGVRVFERAEVPKTGDSLAMARRLARSVRRLTRRRAHRLLRTRRLLKREGV |
| | amino | LQAANFDENGLIKSLPNTPWQLRAAALDRKLTPLEWSAVLLHLIKHRGYLSQRKNEGETADKELGALLKGVAGNAHALQTGDFRTPAELAL |
| | acid | NKFEKESGHIRNQRSDYSHTFSRKDLQAELILLFEKQKEFGNPHVSGGLKEGIETLLMTQRPALSGDAVQKMLGHCTFEPAEPKAAKNTYT |
| | sequence | AERFIWLTKLNNLRILEQGSERPLTDTERATLMDEPYRKSKLTYAQARKLLGLEDTAFFKGLRYGKDNAEASTLMEMKAYHAISRALEKEG |
| | of | LKDKKSPLNLSPELQDEIGTAFSLFKTDEDITGRLKDRIQPEILEALLKHISFDKFVQISLKALRRIVPLMEQGKRYDEACAEIYGDHYGK |
| | Nme1Cas9 | KNTEEKIYLPPIPADEIRNPVVLRALSQARKVINGVVRRYGSPARIHIETAREVGKSFKDRKEIEKRQEENRKDREKAAAKFREYFPNFVG |
| | cleavase | EPKSKDILKLRLYEQQHGKCLYSGKEINLGRLNEKGYVEIDHALPFSRTWDDSFNNKVLVLGSENQNKGNQTPYEYFNGKDNSREWQEFKA |
| | | RVETSRFPRSKKQRILLQKFDEDGFKERNLNDTRYVNRFLCQFVADRMRLTGKGKKRVFASNGQITNLLRGFWGLRKVRAENDRHHALDAV |
| | | VVACSTVAMQQKITRFVRYKEMNAFDGKTIDKETGEVLHQKTHFPQPWEFFAQEVMIRVFGKPDGKPEFEEADTLEKLRTLLAEKLSSRPE |
| | | AVHEYVTPLFVSRAPNRKMSGQGHMETVKSAKRLDEGVSVLRVPLTQLKLKDLEKMVNREREPKLYEALKARLEAHKDDPAKAFAEPFYKY |
| | | DKAGNRTQQVKAVRVEQVQKTGVWVRNHNGIADNATMVRVDVFEKGDKYYLVPIYSWQVAKGILPDRAVVQGKDEEDWQLIDDSFNFKFSL |
| | | HPNDLVEVITKKARMFGYFASCHRGTGNINIRIHDLDHKIGKNGILEGIGVKTALSFQKYQIDELGKEIRPCRLKKRPPVR |
| 121 | Exemplary | GCTGCTTTTAAGCCTAATTCTATTAATTATATTCTTGGTCTTGATATTGGTATTGCTTCTGTTGGTTGGGCTATGGTTGAGATTGATGAGG |
| | coding | AGGAGAATCCTATTCGTCTTATTGATCTTGGTGTTCGTGTTTTTGAGCGTGCTGAGGTTCCTAAGACTGGTGATTCTCTTGCTATGGCTCG |
| | sequence | TCGTCTTGCTCGTTCTGTTCGTCGTCTTACTCGTCGTCGTGCTCATCGTCTTCTTCGTACTCGTCGTCTTCTTAAGCGTGAGGGTGTTCTT |
| | encoding | CAGGCTGCTAATTTTGATGAGAATGGTCTTATTAAGTCTCTTCCTAATACTCCTTGGCAGCTTCGTGCTGCTGCTCTTGATCGTAAGCTTA |
| | Nme1Cas9 | CTCCTCTTGAGTGGTCTGCTGTTCTTCTTCATCTTATTAAGCATCGTGGTTATCTTTCTCAGCGTAAGAATGAGGGTGAGACTGCTGATAA |
| | cleavase | GGAGCTTGGTGCTCTTCTTAAGGGTGTTGCTGGTAATGCTCATGCTCTTCAGACTGGTGATTTTCGTACTCCTGCTGAGCTTGCTCTTAAT |
| | | AAGTTTGAGAAGGAGTCTGGTCATATTCGTAATCAGCGTTCTGATTATTCTCATACTTTTTCTCGTAAGGATCTTCAGGCTGAGCTTATTC |
| | | TTCTTTTTGAGAAGCAGAAGGAGTTTGGTAATCCTCATGTTTCTGGTGGTCTTAAGGAGGGTATTGAGACTCTTCTTATGACTCAGCGTCC |
| | | TGCTCTTTCTGGTGATGCTGTTCAGAAGATGCTTGGTCATTGTACTTTTGAGCCTGCTGAGCCTAAGGCTGCTAAGAATACTTATACTGCT |
| | | GAGCGTTTTATTTGGCTTACTAAGCTTAATAATCTTCGTATTCTTGAGCAGGGTTCTGAGCGTCCTCTTACTGATACTGAGCGTGCTACTC |
| | | TTATGGATGAGCCTTATCGTAAGTCTAAGCTTACTTATGCTCAGGCTCGTAAGCTTCTTGGTCTTGAGGATACTGCTTTTTTTAAGGGTCT |
| | | TCGTTATGGTAAGGATAATGCTGAGGCTTCTACTCTTATGGAGATGAAGGCTTATCATGCTATTTCTCGTGCTCTTGAGAAGGAGGGTCTT |
| | | AAGGATAAGAAGTCTCCTCTTAATCTTTCTCCTGAGCTTCAGGATGAGATTGGTACTGCTTTTTCTCTTTTTAAGACTGATGAGGATATTA |
| | | CTGGTCGTCTTAAGGATCGTATTCAGCCTGAGATTCTTGAGGCTCTTCTTAAGCATATTTCTTTTGATAAGTTTGTTCAGATTTCTCTTAA |
| | | GGCTCTTCGTCGTATTGTTCCTCTTATGGAGCAGGGTAAGCGTTATGATGAGGCTTGTGCTGAGATTTATGGTGATCATTATGGTAAGAAG |
| | | AATACTGAGGAGAAGATTTATCTTCCTCCTATTCCTGCTGATGAGATTCGTAATCCTGTTGTTCTTCGTGCTCTTTCTCAGGCTCGTAAGG |
| | | TTATTAATGGTGTTGTTCGTCGTTATGGTTCTCCTGCTCGTATTCATATTGAGACTGCTCGTGAGGTTGGTAAGTCTTTTAAGGATCGTAA |
| | | GGAGATTGAGAAGCGTCAGGAGGAGAATCGTAAGGATCGTGAGAAGGCTGCTGCTAAGTTTCGTGAGTATTTTCCTAATTTTGTTGGTGAG |
| | | CCTAAGTCTAAGGATATTCTTAAGCTTCGTCTTTATGAGCAGCAGCATGGTAAGTGTCTTTATTCTGGTAAGGAGATTAATCTTGGTCGTC |
| | | TTAATGAGAAGGGTTATGTTGAGATTGATCATGCTCTTCCTTTTTCTCGTACTTGGGATGATTCTTTTAATAATAAGGTTCTTGTTCTTGG |
| | | TTCTGAGAATCAGAATAAGGGTAATCAGACTCCTTATGAGTATTTTAATGGTAAGGATAATTCTCGTGAGTGGCAGGAGTTTAAGGCTCGT |
| | | GTTGAGACTTCTCGTTTTCCTCGTTCTAAGAAGCAGCGTATTCTTCTTCAGAAGTTTGATGAGGATGGTTTTAAGGAGCGTAATCTTAATG |
| | | ATACTCGTTATGTTAATCGTTTTCTTTGTCAGTTTGTTGCTGATCGTATGCGTCTTACTGGTAAGGGTAAGAAGCGTGTTTTTGCTTCTAA |
| | | TGGTCAGATTACTAATCTTCTTCGTGGTTTTTGGGGTCTTCGTAAGGTTCGTGCTGAGAATGATCGTCATCATGCTCTTGATGCTGTTGTT |
| | | GTTGCTTGTTCTACTGTTGCTATGCAGCAGAAGATTACTCGTTTTGTTCGTTATAAGGAGATGAATGCTTTTGATGGTAAGACTATTGATA |
| | | AGGAGACTGGTGAGGTTCTTCATCAGAAGACTCATTTTCCTCAGCCTTGGGAGTTTTTTGCTCAGGAGGTTATGATTCGTGTTTTTGGTAA |
| | | GCCTGATGGTAAGCCTGAGTTTGAGGAGGCTGATACTCTTGAGAAGCTTCGTACTCTTCTTGCTGAGAAGCTTTCTTCTCGTCCTGAGGCT |
| | | GTTCATGAGTATGTTACTCCTCTTTTTGTTTCTCGTGCTCCTAATCGTAAGATGTCTGGTCAGGGTCATATGGAGACTGTTAAGTCTGCTA |
| | | AGCGTCTTGATGAGGGTGTTTCTGTTCTTCGTGTTCCTCTTACTCAGCTTAAGCTTAAGGATCTTGAGAAGATGGTTAATCGTGAGCGTGA |
| | | GCCTAAGCTTTATGAGGCTCTTAAGGCTCGTCTTGAGGCTCATAAGGATGATCCTGCTAAGGCTTTTGCTGAGCCTTTTTATAAGTATGAT |
| | | AAGGCTGGTAATCGTACTCAGCAGGTTAAGGCTGTTCGTGTTGAGCAGGTTCAGAAGACTGGTGTTTGGGTTCGTAATCATAATGGTATTG |
| | | CTGATAATGCTACTATGGTTCGTGTTGATGTTTTTGAGAAGGGTGATAAGTATTATCTTGTTCCTATTTATTCTTGGCAGGTTGCTAAGGG |
| | | TATTCTTCCTGATCGTGCTGTTGTTCAGGGTAAGGATGAGGAGGATTGGCAGCTTATTGATGATTCTTTTAATTTTAAGTTTTCTCTTCAT |
| | | CCTAATGATCTTGTTGAGGTTATTACTAAGAAGGCTCGTATGTTTGGTTATTTTGCTTCTTGTCATCGTGGTACTGGTAATATTAATATTC |
| | | GTATTCATGATCTTGATCATAAGATTGGTAAGAATGGTATTCTTGAGGGTATTGGTGTTAAGACTGCTCTTTCTTTTCAGAAGTATCAGAT |
| | | TGATGAGCTTGGTAAGGAGATTCGTCCTTGTCGTCTTAAGAAGCGTCCTCCTGTTCGT |
| 122 | Exemplary | GCCGCCTTCAAGCCCAACTCCATCAACTACATCCTGGGCCTGGACATCGGCATCGCCTCCGTGGGCTGGGCCATGGTGGAGATCGACGAGG |
| | coding | AGGAGAACCCCATCCGGCTGATCGACCTGGGCGTGCGGGTGTTCGAGCGGGCCGAGGTGCCCAAGACCGGCGACTCCCTGGCCATGGCCCG |
| | sequence | GCGGCTGGCCCGGTCCGTGCGGCGGCTGACCCGGCGGCGGGCCCACCGGCTGCTGCGGACCCGGCGGCTGCTGAAGCGGGAGGGCGTGCTG |
| | | CAGGCCGCCAACTTCGACGAGAACGGCCTGATCAAGTCCCTGCCCAACACCCCCTGGCAGCTGCGGGCCGCCGCCCTGGACCGGAAGCTGA |
| | encoding | CCCCCCTGGAGTGGTCCGCCGTGCTGCTGCACCTGATCAAGCACCGGGGCTACCTGTCCCAGCGGAAGAACGAGGGCGAGACCGCCGACAA |
| | Nme1Cas9 | GGAGCTGGGCGCCCTGCTGAAGGGCGTGGCCGGCAACGCCCACGCCCTGCAGACCGGCGACTTCCGGACCCCCGCCGAGCTGGCCCTGAAC |
| | cleavase | AAGTTCGAGAAGGAGTCCGGCCACATCCGGAACCAGCGGTCCGACTACTCCCACACCTTCTCCCGGAAGGACCTGCAGGCCGAGCTGATCC |
| | | TGCTGTTCGAGAAGCAGAAGGAGTTCGGCAACCCCCACGTGTCCGGCGGCCTGAAGGAGGGCATCGAGACCCTGCTGATGACCCAGCGGCC |
| | | CGCCCTGTCCGGCGACGCCGTGCAGAAGATGCTGGGCCACTGCACCTTCGAGCCCGCCGAGCCCAAGGCCGCCAAGAACACCTACACCGCC |
| | | GAGCGGTTCATCTGGCTGACCAAGCTGAACAACCTGCGGATCCTGGAGCAGGGCTCCGAGCGGCCCCTGACCGACACCGAGCGGGCCACCC |
| | | TGATGGACGAGCCCTACCGGAAGTCCAAGCTGACCTACGCCCAGGCCCGGAAGCTGCTGGGCCTGGAGGACACCGCCTTCTTCAAGGGCCT |
| | | GCGGTACGGCAAGGACAACGCCGAGGCCTCCACCCTGATGGAGATGAAGGCCTACCACGCCATCTCCCGGGCCCTGGAGAAGGAGGGCCTG |
| | | AAGGACAAGAAGTCCCCCCTGAACCTGTCCCCCGAGCTGCAGGACGAGATCGGCACCGCCTTCTCCCTGTTCAAGACCGACGAGGACATCA |
| | | CCGGCCGGCTGAAGGACCGGATCCAGCCCGAGATCCTGGAGGCCCTGCTGAAGCACATCTCCTTCGACAAGTTCGTGCAGATCTCCCTGAA |
| | | GGCCCTGCGGCGGATCGTGCCCCTGATGGAGCAGGGCAAGCGGTACGACGAGGCCTGCGCCGAGATCTACGGCGACCACTACGGCAAGAAG |
| | | AACACCGAGGAGAAGATCTACCTGCCCCCCATCCCCGCCGACGAGATCCGGAACCCCGTGGTGCTGCGGGCCCTGTCCCAGGCCCGGAAGG |
| | | TGATCAACGGCGTGGTGCGGCGGTACGGCTCCCCCGCCCGGATCCACATCGAGACCGCCCGGGAGGTGGGCAAGTCCTTCAAGGACCGGAA |
| | | GGAGATCGAGAAGCGGCAGGAGGAGAACCGGAAGGACCGGGAGAAGGCCGCCGCCAAGTTCCGGGAGTACTTCCCCAACTTCGTGGGCGAG |
| | | CCCAAGTCCAAGGACATCCTGAAGCTGCGGCTGTACGAGCAGCAGCACGGCAAGTGCCTGTACTCCGGCAAGGAGATCAACCTGGGCCGGC |
| | | TGAACGAGAAGGGCTACGTGGAGATCGACCACGCCCTGCCCTTCTCCCGGACCTGGGACGACTCCTTCAACAACAAGGTGCTGGTGCTGGG |
| | | CTCCGAGAACCAGAACAAGGGCAACCAGACCCCCTACGAGTACTTCAACGGCAAGGACAACTCCCGGGAGTGGCAGGAGTTCAAGGCCCGG |
| | | GTGGAGACCTCCCGGTTCCCCCGGTCCAAGAAGCAGCGGATCCTGCTGCAGAAGTTCGACGAGGACGGCTTCAAGGAGCGGAACCTGAACG |
| | | ACACCCGGTACGTGAACCGGTTCCTGTGCCAGTTCGTGGCCGACCGGATGCGGCTGACCGGCAAGGGCAAGAAGCGGGTGTTCGCCTCCAA |
| | | CGGCCAGATCACCAACCTGCTGCGGGGCTTCTGGGGCCTGCGGAAGGTGCGGGCCGAGAACGACCGGCACCACGCCCTGGACGCCGTGGTG |
| | | GTGGCCTGCTCCACCGTGGCCATGCAGCAGAAGATCACCCGGTTCGTGCGGTACAAGGAGATGAACGCCTTCGACGGCAAGACCATCGACA |
| | | AGGAGACCGGCGAGGTGCTGCACCAGAAGACCCACTTCCCCCAGCCCTGGGAGTTCTTCGCCCAGGAGGTGATGATCCGGGTGTTCGGCAA |
| | | GCCCGACGGCAAGCCCGAGTTCGAGGAGGCCGACACCCTGGAGAAGCTGCGGACCCTGCTGGCCGAGAAGCTGTCCTCCCGGCCCGAGGCC |
| | | GTGCACGAGTACGTGACCCCCCTGTTCGTGTCCCGGGCCCCCAACCGGAAGATGTCCGGCCAGGGCCACATGGAGACCGTGAAGTCCGCCA |
| | | AGCGGCTGGACGAGGGCGTGTCCGTGCTGCGGGTGCCCCTGACCCAGCTGAAGCTGAAGGACCTGGAGAAGATGGTGAACCGGGAGCGGGA |
| | | GCCCAAGCTGTACGAGGCCCTGAAGGCCCGGCTGGAGGCCCACAAGGACGACCCCGCCAAGGCCTTCGCCGAGCCCTTCTACAAGTACGAC |
| | | AAGGCCGGCAACCGGACCCAGCAGGTGAAGGCCGTGCGGGTGGAGCAGGTGCAGAAGACCGGCGTGTGGGTGCGGAACCACAACGGCATCG |
| | | CCGACAACGCCACCATGGTGCGGGTGGACGTGTTCGAGAAGGGCGACAAGTACTACCTGGTGCCCATCTACTCCTGGCAGGTGGCCAAGGG |
| | | CATCCTGCCCGACCGGGCCGTGGTGCAGGGCAAGGACGAGGAGGACTGGCAGCTGATCGACGACTCCTTCAACTTCAAGTTCTCCCTGCAC |
| | | CCCAACGACCTGGTGGAGGTGATCACCAAGAAGGCCCGGATGTTCGGCTACTTCGCCTCCTGCCACCGGGGCACCGGCAACATCAACATCC |
| | | GGATCCACGACCTGGACCACAAGATCGGCAAGAACGGCATCCTGGAGGGCATCGGCGTGAAGACCGCCCTGTCCTTCCAGAAGTACCAGAT |
| | | CGACGAGCTGGGCAAGGAGATCCGGCCCTGCCGGCTGAAGAAGCGGCCCCCCGTGCGG |
| 123 | Exemplary | GCAGCATTCAAACCAAACTCAATCAACTACATCCTAGGACTAGACATCGGAATCGCATCAGTAGGATGAGCAATGGTAGAAATCGACGAAG |
| | coding | AAGAAAACCCAATCCGACTAATCGACCTAGGAGTACGAGTATTCGAACGAGCAGAAGTACCAAAAACAGGAGACTCACTAGCAATGGCACG |
| | sequence | ACGACTAGCACGATCAGTACGACGACTAACACGACGACGAGCACACCGACTACTACGAACACGACGACTACTAAAACGAGAAGGAGTACTA |
| | encoding | CAAGCAGCAAACTTCGACGAAAACGGACTAATCAAATCACTACCAAACACACCATGACAACTACGAGCAGCAGCACTAGACCGAAAACTAA |
| | Nme1Cas9 | CACCACTAGAATGATCAGCAGTACTACTACACCTAATCAAACACCGAGGATACCTATCACAACGAAAAAACGAAGGAGAAACAGCAGACAA |
| | cleavase | AGAACTAGGAGCACTACTAAAAGGAGTAGCAGGAAACGCACACGCACTACAAACAGGAGACTTCCGAACACCAGCAGAACTAGCACTAAAC |
| | | AAATTCGAAAAAGAATCAGGACACATCCGAAACCAACGATCAGACTACTCACACACATTCTCACGAAAAGACCTACAAGCAGAACTAATCC |
| | | TACTATTCGAAAAACAAAAAGAATTCGGAAACCCACACGTATCAGGAGGACTAAAAGAAGGAATCGAAACACTACTAATGACACAACGACC |
| | | AGCACTATCAGGAGACGCAGTACAAAAAATGCTAGGACACTGCACATTCGAACCAGCAGAACCAAAAGCAGCAAAAAACACATACACAGCA |
| | | GAACGATTCATCTGACTAACAAAACTAAACAACCTACGAATCCTAGAACAAGGATCAGAACGACCACTAACAGACACAGAACGAGCAACAC |
| | | TAATGGACGAACCATACCGAAAATCAAAACTAACATACGCACAAGCACGAAAACTACTAGGACTAGAAGACACAGCATTCTTCAAAGGACT |
| | | ACGATACGGAAAAGACAACGCAGAAGCATCAACACTAATGGAAATGAAAGCATACCACGCAATCTCACGAGCACTAGAAAAAGAAGGACTA |
| | | AAAGACAAAAAATCACCACTAAACCTATCACCAGAACTACAAGACGAAATCGGAACAGCATTCTCACTATTCAAAACAGACGAAGACATCA |
| | | CAGGACGACTAAAAGACCGAATCCAACCAGAAATCCTAGAAGCACTACTAAAACACATCTCATTCGACAAATTCGTACAAATCTCACTAAA |
| | | AGCACTACGACGAATCGTACCACTAATGGAACAAGGAAAACGATACGACGAAGCATGCGCAGAAATCTACGGAGACCACTACGGAAAAAAA |
| | | AACACAGAAGAAAAAATCTACCTACCACCAATCCCAGCAGACGAAATCCGAAACCCAGTAGTACTACGAGCACTATCACAAGCACGAAAAG |
| | | TAATCAACGGAGTAGTACGACGATACGGATCACCAGCACGAATCCACATCGAAACAGCACGAGAAGTAGGAAAATCATTCAAAGACCGAAA |
| | | AGAAATCGAAAAACGACAAGAAGAAAACCGAAAAGACCGAGAAAAAGCAGCAGCAAAATTCCGAGAATACTTCCCAAACTTCGTAGGAGAA |
| | | CCAAAATCAAAAGACATCCTAAAACTACGACTATACGAACAACAACACGGAAAATGCCTATACTCAGGAAAAGAAATCAACCTAGGACGAC |
| | | TAAACGAAAAAGGATACGTAGAAATCGACCACGCACTACCATTCTCACGAACATGAGACGACTCATTCAACAACAAAGTACTAGTACTAGG |
| | | ATCAGAAAACCAAAACAAAGGAAACCAAACACCATACGAATACTTCAACGGAAAAGACAACTCACGAGAATGACAAGAATTCAAAGCACGA |
| | | GTAGAAACATCACGATTCCCACGATCAAAAAAACAACGAATCCTACTACAAAAATTCGACGAAGACGGATTCAAAGAACGAAACCTAAACG |
| | | ACACACGATACGTAAACCGATTCCTATGCCAATTCGTAGCAGACCGAATGCGACTAACAGGAAAAGGAAAAAAACGAGTATTCGCATCAAA |
| | | CGGACAAATCACAAACCTACTACGAGGATTCTGAGGACTACGAAAAGTACGAGCAGAAAACGACCGACACCACGCACTAGACGCAGTAGTA |
| | | GTAGCATGCTCAACAGTAGCAATGCAACAAAAAATCACACGATTCGTACGATACAAAGAAATGAACGCATTCGACGGAAAAACAATCGACA |
| | | AAGAAACAGGAGAAGTACTACACCAAAAAACACACTTCCCACAACCATGAGAATTCTTCGCACAAGAAGTAATGATCCGAGTATTCGGAAA |
| | | ACCAGACGGAAAACCAGAATTCGAAGAAGCAGACACACTAGAAAAACTACGAACACTACTAGCAGAAAAACTATCATCACGACCAGAAGCA |
| | | GTACACGAATACGTAACACCACTATTCGTATCACGAGCACCAAACCGAAAAATGTCAGGACAAGGACACATGGAAACAGTAAAATCAGCAA |
| | | AACGACTAGACGAAGGAGTATCAGTACTACGAGTACCACTAACACAACTAAAACTAAAAGACCTAGAAAAAATGGTAAACCGAGAACGAGA |
| | | ACCAAAACTATACGAAGCACTAAAAGCACGACTAGAAGCACACAAAGACGACCCAGCAAAAGCATTCGCAGAACCATTCTACAAATACGAC |
| | | AAAGCAGGAAACCGAACACAACAAGTAAAAGCAGTACGAGTAGAACAAGTACAAAAAACAGGAGTATGAGTACGAAACCACAACGGAATCG |
| | | CAGACAACGCAACAATGGTACGAGTAGACGTATTCGAAAAAGGAGACAAATACTACCTAGTACCAATCTACTCATGACAAGTAGCAAAAGG |
| | | AATCCTACCAGACCGAGCAGTAGTACAAGGAAAAGACGAAGAAGACTGACAACTAATCGACGACTCATTCAACTTCAAATTCTCACTACAC |
| | | CCAAACGACCTAGTAGAAGTAATCACAAAAAAAGCACGAATGTTCGGATACTTCGCATCATGCCACCGAGGAACAGGAAACATCAACATCC |
| | | GAATCCACGACCTAGACCACAAAATCGGAAAAAACGGAATCCTAGAAGGAATCGGAGTAAAAACAGCACTATCATTCCAAAAATACCAAAT |
| | | CGACGAACTAGGAAAAGAAATCCGACCATGCCGACTAAAAAAACGACCACCAGTACGA |
| 124 | Exemplary | ATGGCTGCTTTTAAGCCTAATTCTATTAATTATATTCTTGGTCTTGATATTGGTATTGCTTCTGTTGGTTGGGCTATGGTTGAGATTGATG |
| | open | AGGAGGAGAATCCTATTCGTCTTATTGATCTTGGTGTTCGTGTTTTTGAGCGTGCTGAGGTTCCTAAGACTGGTGATTCTCTTGCTATGGC |
| | reading | TCGTCGTCTTGCTCGTTCTGTTCGTCGTCTTACTCGTCGTCGTGCTCATCGTCTTCTTCGTACTCGTCGTCTTCTTAAGCGTGAGGGTGTT |
| | frame | CTTCAGGCTGCTAATTTTGATGAGAATGGTCTTATTAAGTCTCTTCCTAATACTCCTTGGCAGCTTCGTGCTGCTGCTCTTGATCGTAAGC |
| | for | TTACTCCTCTTGAGTGGTCTGCTGTTCTTCTTCATCTTATTAAGCATCGTGGTTATCTTTCTCAGCGTAAGAATGAGGGTGAGACTGCTGA |
| | Nme1Cas9 | TAAGGAGCTTGGTGCTCTTCTTAAGGGTGTTGCTGGTAATGCTCATGCTCTTCAGACTGGTGATTTTCGTACTCCTGCTGAGCTTGCTCTT |
| | cleavase | AATAAGTTTGAGAAGGAGTCTGGTCATATTCGTAATCAGCGTTCTGATTATTCTCATACTTTTTCTCGTAAGGATCTTCAGGCTGAGCTTA |
| | | TTCTTCTTTTTGAGAAGCAGAAGGAGTTTGGTAATCCTCATGTTTCTGGTGGTCTTAAGGAGGGTATTGAGACTCTTCTTATGACTCAGCG |
| | | TCCTGCTCTTTCTGGTGATGCTGTTCAGAAGATGCTTGGTCATTGTACTTTTGAGCCTGCTGAGCCTAAGGCTGCTAAGAATACTTATACT |
| | | GCTGAGCGTTTTATTTGGCTTACTAAGCTTAATAATCTTCGTATTCTTGAGCAGGGTTCTGAGCGTCCTCTTACTGATACTGAGCGTGCTA |
| | | CTCTTATGGATGAGCCTTATCGTAAGTCTAAGCTTACTTATGCTCAGGCTCGTAAGCTTCTTGGTCTTGAGGATACTGCTTTTTTTAAGGG |
| | | TCTTCGTTATGGTAAGGATAATGCTGAGGCTTCTACTCTTATGGAGATGAAGGCTTATCATGCTATTTCTCGTGCTCTTGAGAAGGAGGGT |
| | | CTTAAGGATAAGAAGTCTCCTCTTAATCTTTCTCCTGAGCTTCAGGATGAGATTGGTACTGCTTTTTCTCTTTTTAAGACTGATGAGGATA |
| | | TTACTGGTCGTCTTAAGGATCGTATTCAGCCTGAGATTCTTGAGGCTCTTCTTAAGCATATTTCTTTTGATAAGTTTGTTCAGATTTCTCT |
| | | TAAGGCTCTTCGTCGTATTGTTCCTCTTATGGAGCAGGGTAAGCGTTATGATGAGGCTTGTGCTGAGATTTATGGTGATCATTATGGTAAG |
| | | AAGAATACTGAGGAGAAGATTTATCTTCCTCCTATTCCTGCTGATGAGATTCGTAATCCTGTTGTTCTTCGTGCTCTTTCTCAGGCTCGTA |
| | | AGGTTATTAATGGTGTTGTTCGTCGTTATGGTTCTCCTGCTCGTATTCATATTGAGACTGCTCGTGAGGTTGGTAAGTCTTTTAAGGATCG |
| | | TAAGGAGATTGAGAAGCGTCAGGAGGAGAATCGTAAGGATCGTGAGAAGGCTGCTGCTAAGTTTCGTGAGTATTTTCCTAATTTTGTTGGT |
| | | GAGCCTAAGTCTAAGGATATTCTTAAGCTTCGTCTTTATGAGCAGCAGCATGGTAAGTGTCTTTATTCTGGTAAGGAGATTAATCTTGGTC |
| | | GTCTTAATGAGAAGGGTTATGTTGAGATTGATCATGCTCTTCCTTTTTCTCGTACTTGGGATGATTCTTTTAATAATAAGGTTCTTGTTCT |
| | | TGGTTCTGAGAATCAGAATAAGGGTAATCAGACTCCTTATGAGTATTTTAATGGTAAGGATAATTCTCGTGAGTGGCAGGAGTTTAAGGCT |
| | | CGTGTTGAGACTTCTCGTTTTCCTCGTTCTAAGAAGCAGCGTATTCTTCTTCAGAAGTTTGATGAGGATGGTTTTAAGGAGCGTAATCTTA |
| | | ATGATACTCGTTATGTTAATCGTTTTCTTTGTCAGTTTGTTGCTGATCGTATGCGTCTTACTGGTAAGGGTAAGAAGCGTGTTTTTGCTTC |
| | | TAATGGTCAGATTACTAATCTTCTTCGTGGTTTTTGGGGTCTTCGTAAGGTTCGTGCTGAGAATGATCGTCATCATGCTCTTGATGCTGTT |
| | | GTTGTTGCTTGTTCTACTGTTGCTATGCAGCAGAAGATTACTCGTTTTGTTCGTTATAAGGAGATGAATGCTTTTGATGGTAAGACTATTG |
| | | ATAAGGAGACTGGTGAGGTTCTTCATCAGAAGACTCATTTTCCTCAGCCTTGGGAGTTTTTTGCTCAGGAGGTTATGATTCGTGTTTTTGG |
| | | TAAGCCTGATGGTAAGCCTGAGTTTGAGGAGGCTGATACTCTTGAGAAGCTTCGTACTCTTCTTGCTGAGAAGCTTTCTTCTCGTCCTGAG |
| | | GCTGTTCATGAGTATGTTACTCCTCTTTTTGTTTCTCGTGCTCCTAATCGTAAGATGTCTGGTCAGGGTCATATGGAGACTGTTAAGTCTG |
| | | CTAAGCGTCTTGATGAGGGTGTTTCTGTTCTTCGTGTTCCTCTTACTCAGCTTAAGCTTAAGGATCTTGAGAAGATGGTTAATCGTGAGCG |
| | | TGAGCCTAAGCTTTATGAGGCTCTTAAGGCTCGTCTTGAGGCTCATAAGGATGATCCTGCTAAGGCTTTTGCTGAGCCTTTTTATAAGTAT |
| | | GATAAGGCTGGTAATCGTACTCAGCAGGTTAAGGCTGTTCGTGTTGAGCAGGTTCAGAAGACTGGTGTTTGGGTTCGTAATCATAATGGTA |
| | | TTGCTGATAATGCTACTATGGTTCGTGTTGATGTTTTTGAGAAGGGTGATAAGTATTATCTTGTTCCTATTTATTCTTGGCAGGTTGCTAA |
| | | GGGTATTCTTCCTGATCGTGCTGTTGTTCAGGGTAAGGATGAGGAGGATTGGCAGCTTATTGATGATTCTTTTAATTTTAAGTTTTCTCTT |
| | | CATCCTAATGATCTTGTTGAGGTTATTACTAAGAAGGCTCGTATGTTTGGTTATTTTGCTTCTTGTCATCGTGGTACTGGTAATATTAATA |
| | | TTCGTATTCATGATCTTGATCATAAGATTGGTAAGAATGGTATTCTTGAGGGTATTGGTGTTAAGACTGCTCTTTCTTTTCAGAAGTATCA |
| | | GATTGATGAGCTTGGTAAGGAGATTCGTCCTTGTCGTCTTAAGAAGCGTCCTCCTGTTCGTUGA |
| 125 | Exemplary | ATGGCCGCCTTCAAGCCCAACTCCATCAACTACATCCTGGGCCTGGACATCGGCATCGCCTCCGTGGGCTGGGCCATGGTGGAGATCGACG |
| | open | AGGAGGAGAACCCCATCCGGCTGATCGACCTGGGCGTGCGGGTGTTCGAGCGGGCCGAGGTGCCCAAGACCGGCGACTCCCTGGCCATGGC |
| | reading | CCGGCGGCTGGCCCGGTCCGTGCGGCGGCTGACCCGGCGGCGGGCCCACCGGCTGCTGCGGACCCGGCGGCTGCTGAAGCGGGAGGGCGTG |
| | frame | CTGCAGGCCGCCAACTTCGACGAGAACGGCCTGATCAAGTCCCTGCCCAACACCCCCTGGCAGCTGCGGGCCGCCGCCCTGGACCGGAAGC |
| | for | TGACCCCCCTGGAGTGGTCCGCCGTGCTGCTGCACCTGATCAAGCACCGGGGCTACCTGTCCCAGCGGAAGAACGAGGGCGAGACCGCCGA |
| | Nme1Cas9 | CAAGGAGCTGGGCGCCCTGCTGAAGGGCGTGGCCGGCAACGCCCACGCCCTGCAGACCGGCGACTTCCGGACCCCCGCCGAGCTGGCCCTG |
| | cleavase | AACAAGTTCGAGAAGGAGTCCGGCCACATCCGGAACCAGCGGTCCGACTACTCCCACACCTTCTCCCGGAAGGACCTGCAGGCCGAGCTGA |
| | | TCCTGCTGTTCGAGAAGCAGAAGGAGTTCGGCAACCCCCACGTGTCCGGCGGCCTGAAGGAGGGCATCGAGACCCTGCTGATGACCCAGCG |
| | | GCCCGCCCTGTCCGGCGACGCCGTGCAGAAGATGCTGGGCCACTGCACCTTCGAGCCCGCCGAGCCCAAGGCCGCCAAGAACACCTACACC |
| | | GCCGAGCGGTTCATCTGGCTGACCAAGCTGAACAACCTGCGGATCCTGGAGCAGGGCTCCGAGCGGCCCCTGACCGACACCGAGCGGGCCA |
| | | CCCTGATGGACGAGCCCTACCGGAAGTCCAAGCTGACCTACGCCCAGGCCCGGAAGCTGCTGGGCCTGGAGGACACCGCCTTCTTCAAGGG |
| | | CCTGCGGTACGGCAAGGACAACGCCGAGGCCTCCACCCTGATGGAGATGAAGGCCTACCACGCCATCTCCCGGGCCCTGGAGAAGGAGGGC |
| | | CTGAAGGACAAGAAGTCCCCCCTGAACCTGTCCCCCGAGCTGCAGGACGAGATCGGCACCGCCTTCTCCCTGTTCAAGACCGACGAGGACA |
| | | TCACCGGCCGGCTGAAGGACCGGATCCAGCCCGAGATCCTGGAGGCCCTGCTGAAGCACATCTCCTTCGACAAGTTCGTGCAGATCTCCCT |
| | | GAAGGCCCTGCGGCGGATCGTGCCCCTGATGGAGCAGGGCAAGCGGTACGACGAGGCCTGCGCCGAGATCTACGGCGACCACTACGGCAAG |
| | | AAGAACACCGAGGAGAAGATCTACCTGCCCCCCATCCCCGCCGACGAGATCCGGAACCCCGTGGTGCTGCGGGCCCTGTCCCAGGCCCGGA |
| | | AGGTGATCAACGGCGTGGTGCGGCGGTACGGCTCCCCCGCCCGGATCCACATCGAGACCGCCCGGGAGGTGGGCAAGTCCTTCAAGGACCG |
| | | GAAGGAGATCGAGAAGCGGCAGGAGGAGAACCGGAAGGACCGGGAGAAGGCCGCCGCCAAGTTCCGGGAGTACTTCCCCAACTTCGTGGGC |
| | | GAGCCCAAGTCCAAGGACATCCTGAAGCTGCGGCTGTACGAGCAGCAGCACGGCAAGTGCCTGTACTCCGGCAAGGAGATCAACCTGGGCC |
| | | GGCTGAACGAGAAGGGCTACGTGGAGATCGACCACGCCCTGCCCTTCTCCCGGACCTGGGACGACTCCTTCAACAACAAGGTGCTGGTGCT |
| | | GGGCTCCGAGAACCAGAACAAGGGCAACCAGACCCCCTACGAGTACTTCAACGGCAAGGACAACTCCCGGGAGTGGCAGGAGTTCAAGGCC |
| | | CGGGTGGAGACCTCCCGGTTCCCCCGGTCCAAGAAGCAGCGGATCCTGCTGCAGAAGTTCGACGAGGACGGCTTCAAGGAGCGGAACCTGA |
| | | ACGACACCCGGTACGTGAACCGGTTCCTGTGCCAGTTCGTGGCCGACCGGATGCGGCTGACCGGCAAGGGCAAGAAGCGGGTGTTCGCCTC |
| | | CAACGGCCAGATCACCAACCTGCTGCGGGGCTTCTGGGGCCTGCGGAAGGTGCGGGCCGAGAACGACCGGCACCACGCCCTGGACGCCGTG |
| | | GTGGTGGCCTGCTCCACCGTGGCCATGCAGCAGAAGATCACCCGGTTCGTGCGGTACAAGGAGATGAACGCCTTCGACGGCAAGACCATCG |
| | | ACAAGGAGACCGGCGAGGTGCTGCACCAGAAGACCCACTTCCCCCAGCCCTGGGAGTTCTTCGCCCAGGAGGTGATGATCCGGGTGTTCGG |
| | | CAAGCCCGACGGCAAGCCCGAGTTCGAGGAGGCCGACACCCTGGAGAAGCTGCGGACCCTGCTGGCCGAGAAGCTGTCCTCCCGGCCCGAG |
| | | GCCGTGCACGAGTACGTGACCCCCCTGTTCGTGTCCCGGGCCCCCAACCGGAAGATGTCCGGCCAGGGCCACATGGAGACCGTGAAGTCCG |
| | | CCAAGCGGCTGGACGAGGGCGTGTCCGTGCTGCGGGTGCCCCTGACCCAGCTGAAGCTGAAGGACCTGGAGAAGATGGTGAACCGGGAGCG |
| | | GGAGCCCAAGCTGTACGAGGCCCTGAAGGCCCGGCTGGAGGCCCACAAGGACGACCCCGCCAAGGCCTTCGCCGAGCCCTTCTACAAGTAC |
| | | GACAAGGCCGGCAACCGGACCCAGCAGGTGAAGGCCGTGCGGGTGGAGCAGGTGCAGAAGACCGGCGTGTGGGTGCGGAACCACAACGGCA |
| | | TCGCCGACAACGCCACCATGGTGCGGGTGGACGTGTTCGAGAAGGGCGACAAGTACTACCTGGTGCCCATCTACTCCTGGCAGGTGGCCAA |
| | | GGGCATCCTGCCCGACCGGGCCGTGGTGCAGGGCAAGGACGAGGAGGACTGGCAGCTGATCGACGACTCCTTCAACTTCAAGTTCTCCCTG |
| | | CACCCCAACGACCTGGTGGAGGTGATCACCAAGAAGGCCCGGATGTTCGGCTACTTCGCCTCCTGCCACCGGGGCACCGGCAACATCAACA |
| | | TCCGGATCCACGACCTGGACCACAAGATCGGCAAGAACGGCATCCTGGAGGGCATCGGCGTGAAGACCGCCCTGTCCTTCCAGAAGTACCA |
| | | GATCGACGAGCTGGGCAAGGAGATCCGGCCCTGCCGGCTGAAGAAGCGGCCCCCCGTGCGGUGA |
| 126 | Exemplary | ATGGCAGCATTCAAACCAAACTCAATCAACTACATCCTAGGACTAGACATCGGAATCGCATCAGTAGGATGAGCAATGGTAGAAATCGACG |
| | open | AAGAAGAAAACCCAATCCGACTAATCGACCTAGGAGTACGAGTATTCGAACGAGCAGAAGTACCAAAAACAGGAGACTCACTAGCAATGGC |
| | reading | ACGACGACTAGCACGATCAGTACGACGACTAACACGACGACGAGCACACCGACTACTACGAACACGACGACTACTAAAACGAGAAGGAGTA |
| | frame | CTACAAGCAGCAAACTTCGACGAAAACGGACTAATCAAATCACTACCAAACACACCATGACAACTACGAGCAGCAGCACTAGACCGAAAAC |
| | for | TAACACCACTAGAATGATCAGCAGTACTACTACACCTAATCAAACACCGAGGATACCTATCACAACGAAAAAACGAAGGAGAAACAGCAGA |
| | Nme1Cas9 | CAAAGAACTAGGAGCACTACTAAAAGGAGTAGCAGGAAACGCACACGCACTACAAACAGGAGACTTCCGAACACCAGCAGAACTAGCACTA |
| | cleavase | AACAAATTCGAAAAAGAATCAGGACACATCCGAAACCAACGATCAGACTACTCACACACATTCTCACGAAAAGACCTACAAGCAGAACTAA |
| | | TCCTACTATTCGAAAAACAAAAAGAATTCGGAAACCCACACGTATCAGGAGGACTAAAAGAAGGAATCGAAACACTACTAATGACACAACG |
| | | ACCAGCACTATCAGGAGACGCAGTACAAAAAATGCTAGGACACTGCACATTCGAACCAGCAGAACCAAAAGCAGCAAAAAACACATACACA |
| | | GCAGAACGATTCATCTGACTAACAAAACTAAACAACCTACGAATCCTAGAACAAGGATCAGAACGACCACTAACAGACACAGAACGAGCAA |
| | | CACTAATGGACGAACCATACCGAAAATCAAAACTAACATACGCACAAGCACGAAAACTACTAGGACTAGAAGACACAGCATTCTTCAAAGG |
| | | ACTACGATACGGAAAAGACAACGCAGAAGCATCAACACTAATGGAAATGAAAGCATACCACGCAATCTCACGAGCACTAGAAAAAGAAGGA |
| | | CTAAAAGACAAAAAATCACCACTAAACCTATCACCAGAACTACAAGACGAAATCGGAACAGCATTCTCACTATTCAAAACAGACGAAGACA |
| | | TCACAGGACGACTAAAAGACCGAATCCAACCAGAAATCCTAGAAGCACTACTAAAACACATCTCATTCGACAAATTCGTACAAATCTCACT |
| | | AAAAGCACTACGACGAATCGTACCACTAATGGAACAAGGAAAACGATACGACGAAGCATGCGCAGAAATCTACGGAGACCACTACGGAAAA |
| | | AAAAACACAGAAGAAAAAATCTACCTACCACCAATCCCAGCAGACGAAATCCGAAACCCAGTAGTACTACGAGCACTATCACAAGCACGAA |
| | | AAGTAATCAACGGAGTAGTACGACGATACGGATCACCAGCACGAATCCACATCGAAACAGCACGAGAAGTAGGAAAATCATTCAAAGACCG |
| | | AAAAGAAATCGAAAAACGACAAGAAGAAAACCGAAAAGACCGAGAAAAAGCAGCAGCAAAATTCCGAGAATACTTCCCAAACTTCGTAGGA |
| | | GAACCAAAATCAAAAGACATCCTAAAACTACGACTATACGAACAACAACACGGAAAATGCCTATACTCAGGAAAAGAAATCAACCTAGGAC |
| | | GACTAAACGAAAAAGGATACGTAGAAATCGACCACGCACTACCATTCTCACGAACATGAGACGACTCATTCAACAACAAAGTACTAGTACT |
| | | AGGATCAGAAAACCAAAACAAAGGAAACCAAACACCATACGAATACTTCAACGGAAAAGACAACTCACGAGAATGACAAGAATTCAAAGCA |
| | | CGAGTAGAAACATCACGATTCCCACGATCAAAAAAACAACGAATCCTACTACAAAAATTCGACGAAGACGGATTCAAAGAACGAAACCTAA |
| | | ACGACACACGATACGTAAACCGATTCCTATGCCAATTCGTAGCAGACCGAATGCGACTAACAGGAAAAGGAAAAAAACGAGTATTCGCATC |
| | | AAACGGACAAATCACAAACCTACTACGAGGATTCTGAGGACTACGAAAAGTACGAGCAGAAAACGACCGACACCACGCACTAGACGCAGTA |
| | | GTAGTAGCATGCTCAACAGTAGCAATGCAACAAAAAATCACACGATTCGTACGATACAAAGAAATGAACGCATTCGACGGAAAAACAATCG |
| | | ACAAAGAAACAGGAGAAGTACTACACCAAAAAACACACTTCCCACAACCATGAGAATTCTTCGCACAAGAAGTAATGATCCGAGTATTCGG |
| | | AAAACCAGACGGAAAACCAGAATTCGAAGAAGCAGACACACTAGAAAAACTACGAACACTACTAGCAGAAAAACTATCATCACGACCAGAA |
| | | GCAGTACACGAATACGTAACACCACTATTCGTATCACGAGCACCAAACCGAAAAATGTCAGGACAAGGACACATGGAAACAGTAAAATCAG |
| | | CAAAACGACTAGACGAAGGAGTATCAGTACTACGAGTACCACTAACACAACTAAAACTAAAAGACCTAGAAAAAATGGTAAACCGAGAACG |
| | | AGAACCAAAACTATACGAAGCACTAAAAGCACGACTAGAAGCACACAAAGACGACCCAGCAAAAGCATTCGCAGAACCATTCTACAAATAC |
| | | GACAAAGCAGGAAACCGAACACAACAAGTAAAAGCAGTACGAGTAGAACAAGTACAAAAAACAGGAGTATGAGTACGAAACCACAACGGAA |
| | | TCGCAGACAACGCAACAATGGTACGAGTAGACGTATTCGAAAAAGGAGACAAATACTACCTAGTACCAATCTACTCATGACAAGTAGCAAA |
| | | AGGAATCCTACCAGACCGAGCAGTAGTACAAGGAAAAGACGAAGAAGACTGACAACTAATCGACGACTCATTCAACTTCAAATTCTCACTA |
| | | CACCCAAACGACCTAGTAGAAGTAATCACAAAAAAAGCACGAATGTTCGGATACTTCGCATCATGCCACCGAGGAACAGGAAACATCAACA |
| | | TCCGAATCCACGACCTAGACCACAAAATCGGAAAAAACGGAATCCTAGAAGGAATCGGAGTAAAAACAGCACTATCATTCCAAAAATACCA |
| | | AATCGACGAACTAGGAAAAGAAATCCGACCATGCCGACTAAAAAAACGACCACCAGTACGAUAA |
| 127 | Exemplary | MAAFKPNPINYILGLDIGIASVGWAMVEIDEEENPIRLIDLGVRVFERAEVPKTGDSLAMARRLARSVRRLTRRRAHRLLRARRLLKREGV |
| | amino | LQAADFDENGLIKSLPNTPWQLRAAALDRKLTPLEWSAVLLHLIKHRGYLSQRKNEGETADKELGALLKGVADNAHALQTGDFRTPAELAL |
| | acid | NKFEKECGHIRNQRGDYSHTFSRKDLQAELNLLFEKQKEFGNPHVSGGLKEGIETLLMTQRPALSGDAVQKMLGHCTFEPAEPKAAKNTYT |
| | sequence of | AERFIWLTKLNNLRILEQGSERPLTDTERATLMDEPYRKSKLTYAQARKLLSLEDTAFFKGLRYGKDNAEASTLMEMKAYHTISRALEKEG |
| | Nme3Cas9 | LKDKKSPLNLSPELQDEIGTAFSLFKTDEDITGRLKDRIQPEILEALLKHISFDKFVQISLKALRRIVPLMEQGKRYDEACAEIYGDHYGK |
| | cleavase | KNTEEKIYLPPIPADEIRNPVVLRALSQARKVINGVVRRYGSPARIHIETAREVGKSFKDRKEIEKRQEENRKDREKAAAKFREYFPNFVG |
| | | EPKSKDILKLRLYEQQHGKCLYSGKEINLGRLNEKGYVEIDHALPFSRTWDDSFNNKVLVLGSENQNKGNQTPYEYFNGKDNSREWQEFKA |
| | | RVETSRFPRSKKQRILLQKFDEDGFKERNLNDTRYVNRFLCQFVADRMRLTGKGKKRVFASNGQITNLLRGFWGLRKVRAENDRHHALDAV |
| | | VVACSTVAMQQKITRFVRYKEMNAFDGKTIDKETGEVLHQKTHFPQPWEFFAQEVMIRVFGKPDGKPEFEEADTPEKLRTLLAEKLSSRPE |
| | | AVHEYVTPLFVSRAPNRKMSGQGHMETVKSAKRLDEGVSVLRVPLTQLKLKDLEKMVNREREPKLYEALKARLEAHKDDPAKAFAEPFYKY |
| | | DKAGNRTQQVKAVRVEQVQKTGVWVRNHNGIADNATMVRVDVFEKGDKYYLVPIYSWQVAKGILPDRAVVAYADEEDWTVIDESFRFKFVL |
| | | YSNDLIKVQLKKDSFLGYFSGLDRATGAISLREHDLEKSKGKDGMHRIGVKTALSFQKYQIDEMGKEIRPCRLKKRPPVR |
| 128 | Exemplary | GCTGCTTTTAAGCCTAATCCTATTAATTATATTCTTGGTCTTGATATTGGTATTGCTTCTGTTGGTTGGGCTATGGTTGAGATTGATGAGG |
| | coding | AGGAGAATCCTATTCGTCTTATTGATCTTGGTGTTCGTGTTTTTGAGCGTGCTGAGGTTCCTAAGACTGGTGATTCTCTTGCTATGGCTCG |
| | sequence | TCGTCTTGCTCGTTCTGTTCGTCGTCTTACTCGTCGTCGTGCTCATCGTCTTCTTCGTGCTCGTCGTCTTCTTAAGCGTGAGGGTGTTCTT |
| | encoding | CAGGCTGCTGATTTTGATGAGAATGGTCTTATTAAGTCTCTTCCTAATACTCCTTGGCAGCTTCGTGCTGCTGCTCTTGATCGTAAGCTTA |
| | Nme3Cas9 | CTCCTCTTGAGTGGTCTGCTGTTCTTCTTCATCTTATTAAGCATCGTGGTTATCTTTCTCAGCGTAAGAATGAGGGTGAGACTGCTGATAA |
| | cleavase | GGAGCTTGGTGCTCTTCTTAAGGGTGTTGCTGATAATGCTCATGCTCTTCAGACTGGTGATTTTCGTACTCCTGCTGAGCTTGCTCTTAAT |
| | | AAGTTTGAGAAGGAGTGTGGTCATATTCGTAATCAGCGTGGTGATTATTCTCATACTTTTTCTCGTAAGGATCTTCAGGCTGAGCTTAATC |
| | | TTCTTTTTGAGAAGCAGAAGGAGTTTGGTAATCCTCATGTTTCTGGTGGTCTTAAGGAGGGTATTGAGACTCTTCTTATGACTCAGCGTCC |
| | | TGCTCTTTCTGGTGATGCTGTTCAGAAGATGCTTGGTCATTGTACTTTTGAGCCTGCTGAGCCTAAGGCTGCTAAGAATACTTATACTGCT |
| | | GAGCGTTTTATTTGGCTTACTAAGCTTAATAATCTTCGTATTCTTGAGCAGGGTTCTGAGCGTCCTCTTACTGATACTGAGCGTGCTACTC |
| | | TTATGGATGAGCCTTATCGTAAGTCTAAGCTTACTTATGCTCAGGCTCGTAAGCTTCTTTCTCTTGAGGATACTGCTTTTTTTAAGGGTCT |
| | | TCGTTATGGTAAGGATAATGCTGAGGCTTCTACTCTTATGGAGATGAAGGCTTATCATACTATTTCTCGTGCTCTTGAGAAGGAGGGTCTT |
| | | AAGGATAAGAAGTCTCCTCTTAATCTTTCTCCTGAGCTTCAGGATGAGATTGGTACTGCTTTTTCTCTTTTTAAGACTGATGAGGATATTA |
| | | CTGGTCGTCTTAAGGATCGTATTCAGCCTGAGATTCTTGAGGCTCTTCTTAAGCATATTTCTTTTGATAAGTTTGTTCAGATTTCTCTTAA |
| | | GGCTCTTCGTCGTATTGTTCCTCTTATGGAGCAGGGTAAGCGTTATGATGAGGCTTGTGCTGAGATTTATGGTGATCATTATGGTAAGAAG |
| | | AATACTGAGGAGAAGATTTATCTTCCTCCTATTCCTGCTGATGAGATTCGTAATCCTGTTGTTCTTCGTGCTCTTTCTCAGGCTCGTAAGG |
| | | TTATTAATGGTGTTGTTCGTCGTTATGGTTCTCCTGCTCGTATTCATATTGAGACTGCTCGTGAGGTTGGTAAGTCTTTTAAGGATCGTAA |
| | | GGAGATTGAGAAGCGTCAGGAGGAGAATCGTAAGGATCGTGAGAAGGCTGCTGCTAAGTTTCGTGAGTATTTTCCTAATTTTGTTGGTGAG |
| | | CCTAAGTCTAAGGATATTCTTAAGCTTCGTCTTTATGAGCAGCAGCATGGTAAGTGTCTTTATTCTGGTAAGGAGATTAATCTTGGTCGTC |
| | | TTAATGAGAAGGGTTATGTTGAGATTGATCATGCTCTTCCTTTTTCTCGTACTTGGGATGATTCTTTTAATAATAAGGTTCTTGTTCTTGG |
| | | TTCTGAGAATCAGAATAAGGGTAATCAGACTCCTTATGAGTATTTTAATGGTAAGGATAATTCTCGTGAGTGGCAGGAGTTTAAGGCTCGT |
| | | GTTGAGACTTCTCGTTTTCCTCGTTCTAAGAAGCAGCGTATTCTTCTTCAGAAGTTTGATGAGGATGGTTTTAAGGAGCGTAATCTTAATG |
| | | ATACTCGTTATGTTAATCGTTTTCTTTGTCAGTTTGTTGCTGATCGTATGCGTCTTACTGGTAAGGGTAAGAAGCGTGTTTTTGCTTCTAA |
| | | TGGTCAGATTACTAATCTTCTTCGTGGTTTTTGGGGTCTTCGTAAGGTTCGTGCTGAGAATGATCGTCATCATGCTCTTGATGCTGTTGTT |
| | | GTTGCTTGTTCTACTGTTGCTATGCAGCAGAAGATTACTCGTTTTGTTCGTTATAAGGAGATGAATGCTTTTGATGGTAAGACTATTGATA |
| | | AGGAGACTGGTGAGGTTCTTCATCAGAAGACTCATTTTCCTCAGCCTTGGGAGTTTTTTGCTCAGGAGGTTATGATTCGTGTTTTTGGTAA |
| | | GCCTGATGGTAAGCCTGAGTTTGAGGAGGCTGATACTCCTGAGAAGCTTCGTACTCTTCTTGCTGAGAAGCTTTCTTCTCGTCCTGAGGCT |
| | | GTTCATGAGTATGTTACTCCTCTTTTTGTTTCTCGTGCTCCTAATCGTAAGATGTCTGGTCAGGGTCATATGGAGACTGTTAAGTCTGCTA |
| | | AGCGTCTTGATGAGGGTGTTTCTGTTCTTCGTGTTCCTCTTACTCAGCTTAAGCTTAAGGATCTTGAGAAGATGGTTAATCGTGAGCGTGA |
| | | GCCTAAGCTTTATGAGGCTCTTAAGGCTCGTCTTGAGGCTCATAAGGATGATCCTGCTAAGGCTTTTGCTGAGCCTTTTTATAAGTATGAT |
| | | AAGGCTGGTAATCGTACTCAGCAGGTTAAGGCTGTTCGTGTTGAGCAGGTTCAGAAGACTGGTGTTTGGGTTCGTAATCATAATGGTATTG |
| | | CTGATAATGCTACTATGGTTCGTGTTGATGTTTTTGAGAAGGGTGATAAGTATTATCTTGTTCCTATTTATTCTTGGCAGGTTGCTAAGGG |
| | | TATTCTTCCTGATCGTGCTGTTGTTGCTTATGCTGATGAGGAGGATTGGACTGTTATTGATGAGTCTTTTCGTTTTAAGTTTGTTCTTTAT |
| | | TCTAATGATCTTATTAAGGTTCAGCTTAAGAAGGATTCTTTTCTTGGTTATTTTTCTGGTCTTGATCGTGCTACTGGTGCTATTTCTCTTC |
| | | GTGAGCATGATCTTGAGAAGTCTAAGGGTAAGGATGGTATGCATCGTATTGGTGTTAAGACTGCTCTTTCTTTTCAGAAGTATCAGATTGA |
| | | TGAGATGGGTAAGGAGATTCGTCCTTGTCGTCTTAAGAAGCGTCCTCCTGTTCGT |
| 129 | Exemplary | GCCGCCTTCAAGCCCAACCCCATCAACTACATCCTGGGCCTGGACATCGGCATCGCCTCCGTGGGCTGGGCCATGGTGGAGATCGACGAGG |
| | coding | AGGAGAACCCCATCCGGCTGATCGACCTGGGCGTGCGGGTGTTCGAGCGGGCCGAGGTGCCCAAGACCGGCGACTCCCTGGCCATGGCCCG |
| | sequence | GCGGCTGGCCCGGTCCGTGCGGCGGCTGACCCGGCGGCGGGCCCACCGGCTGCTGCGGGCCCGGCGGCTGCTGAAGCGGGAGGGCGTGCTG |
| | encoding | CAGGCCGCCGACTTCGACGAGAACGGCCTGATCAAGTCCCTGCCCAACACCCCCTGGCAGCTGCGGGCCGCCGCCCTGGACCGGAAGCTGA |
| | Nme3Cas9 | CCCCCCTGGAGTGGTCCGCCGTGCTGCTGCACCTGATCAAGCACCGGGGCTACCTGTCCCAGCGGAAGAACGAGGGCGAGACCGCCGACAA |
| | cleavase | GGAGCTGGGCGCCCTGCTGAAGGGCGTGGCCGACAACGCCCACGCCCTGCAGACCGGCGACTTCCGGACCCCCGCCGAGCTGGCCCTGAAC |
| | | AAGTTCGAGAAGGAGTGCGGCCACATCCGGAACCAGCGGGGCGACTACTCCCACACCTTCTCCCGGAAGGACCTGCAGGCCGAGCTGAACC |
| | | TGCTGTTCGAGAAGCAGAAGGAGTTCGGCAACCCCCACGTGTCCGGCGGCCTGAAGGAGGGCATCGAGACCCTGCTGATGACCCAGCGGCC |
| | | CGCCCTGTCCGGCGACGCCGTGCAGAAGATGCTGGGCCACTGCACCTTCGAGCCCGCCGAGCCCAAGGCCGCCAAGAACACCTACACCGCC |
| | | GAGCGGTTCATCTGGCTGACCAAGCTGAACAACCTGCGGATCCTGGAGCAGGGCTCCGAGCGGCCCCTGACCGACACCGAGCGGGCCACCC |
| | | TGATGGACGAGCCCTACCGGAAGTCCAAGCTGACCTACGCCCAGGCCCGGAAGCTGCTGTCCCTGGAGGACACCGCCTTCTTCAAGGGCCT |
| | | GCGGTACGGCAAGGACAACGCCGAGGCCTCCACCCTGATGGAGATGAAGGCCTACCACACCATCTCCCGGGCCCTGGAGAAGGAGGGCCTG |
| | | AAGGACAAGAAGTCCCCCCTGAACCTGTCCCCCGAGCTGCAGGACGAGATCGGCACCGCCTTCTCCCTGTTCAAGACCGACGAGGACATCA |
| | | CCGGCCGGCTGAAGGACCGGATCCAGCCCGAGATCCTGGAGGCCCTGCTGAAGCACATCTCCTTCGACAAGTTCGTGCAGATCTCCCTGAA |
| | | GGCCCTGCGGCGGATCGTGCCCCTGATGGAGCAGGGCAAGCGGTACGACGAGGCCTGCGCCGAGATCTACGGCGACCACTACGGCAAGAAG |
| | | AACACCGAGGAGAAGATCTACCTGCCCCCCATCCCCGCCGACGAGATCCGGAACCCCGTGGTGCTGCGGGCCCTGTCCCAGGCCCGGAAGG |
| | | TGATCAACGGCGTGGTGCGGCGGTACGGCTCCCCCGCCCGGATCCACATCGAGACCGCCCGGGAGGTGGGCAAGTCCTTCAAGGACCGGAA |
| | | GGAGATCGAGAAGCGGCAGGAGGAGAACCGGAAGGACCGGGAGAAGGCCGCCGCCAAGTTCCGGGAGTACTTCCCCAACTTCGTGGGCGAG |
| | | CCCAAGTCCAAGGACATCCTGAAGCTGCGGCTGTACGAGCAGCAGCACGGCAAGTGCCTGTACTCCGGCAAGGAGATCAACCTGGGCCGGC |
| | | TGAACGAGAAGGGCTACGTGGAGATCGACCACGCCCTGCCCTTCTCCCGGACCTGGGACGACTCCTTCAACAACAAGGTGCTGGTGCTGGG |
| | | CTCCGAGAACCAGAACAAGGGCAACCAGACCCCCTACGAGTACTTCAACGGCAAGGACAACTCCCGGGAGTGGCAGGAGTTCAAGGCCCGG |
| | | GTGGAGACCTCCCGGTTCCCCCGGTCCAAGAAGCAGCGGATCCTGCTGCAGAAGTTCGACGAGGACGGCTTCAAGGAGCGGAACCTGAACG |
| | | ACACCCGGTACGTGAACCGGTTCCTGTGCCAGTTCGTGGCCGACCGGATGCGGCTGACCGGCAAGGGCAAGAAGCGGGTGTTCGCCTCCAA |
| | | CGGCCAGATCACCAACCTGCTGCGGGGCTTCTGGGGCCTGCGGAAGGTGCGGGCCGAGAACGACCGGCACCACGCCCTGGACGCCGTGGTG |
| | | GTGGCCTGCTCCACCGTGGCCATGCAGCAGAAGATCACCCGGTTCGTGCGGTACAAGGAGATGAACGCCTTCGACGGCAAGACCATCGACA |
| | | AGGAGACCGGCGAGGTGCTGCACCAGAAGACCCACTTCCCCCAGCCCTGGGAGTTCTTCGCCCAGGAGGTGATGATCCGGGTGTTCGGCAA |
| | | GCCCGACGGCAAGCCCGAGTTCGAGGAGGCCGACACCCCCGAGAAGCTGCGGACCCTGCTGGCCGAGAAGCTGTCCTCCCGGCCCGAGGCC |
| | | GTGCACGAGTACGTGACCCCCCTGTTCGTGTCCCGGGCCCCCAACCGGAAGATGTCCGGCCAGGGCCACATGGAGACCGTGAAGTCCGCCA |
| | | AGCGGCTGGACGAGGGCGTGTCCGTGCTGCGGGTGCCCCTGACCCAGCTGAAGCTGAAGGACCTGGAGAAGATGGTGAACCGGGAGCGGGA |
| | | GCCCAAGCTGTACGAGGCCCTGAAGGCCCGGCTGGAGGCCCACAAGGACGACCCCGCCAAGGCCTTCGCCGAGCCCTTCTACAAGTACGAC |
| | | AAGGCCGGCAACCGGACCCAGCAGGTGAAGGCCGTGCGGGTGGAGCAGGTGCAGAAGACCGGCGTGTGGGTGCGGAACCACAACGGCATCG |
| | | CCGACAACGCCACCATGGTGCGGGTGGACGTGTTCGAGAAGGGCGACAAGTACTACCTGGTGCCCATCTACTCCTGGCAGGTGGCCAAGGG |
| | | CATCCTGCCCGACCGGGCCGTGGTGGCCTACGCCGACGAGGAGGACTGGACCGTGATCGACGAGTCCTTCCGGTTCAAGTTCGTGCTGTAC |
| | | TCCAACGACCTGATCAAGGTGCAGCTGAAGAAGGACTCCTTCCTGGGCTACTTCTCCGGCCTGGACCGGGCCACCGGCGCCATCTCCCTGC |
| | | GGGAGCACGACCTGGAGAAGTCCAAGGGCAAGGACGGCATGCACCGGATCGGCGTGAAGACCGCCCTGTCCTTCCAGAAGTACCAGATCGA |
| | | CGAGATGGGCAAGGAGATCCGGCCCTGCCGGCTGAAGAAGCGGCCCCCCGTGCGG |
| 130 | Exemplary | GCAGCATTCAAACCAAACCCAATCAACTACATCCTAGGACTAGACATCGGAATCGCATCAGTAGGATGAGCAATGGTAGAAATCGACGAAG |
| | coding | AAGAAAACCCAATCCGACTAATCGACCTAGGAGTACGAGTATTCGAACGAGCAGAAGTACCAAAAACAGGAGACTCACTAGCAATGGCACG |
| | sequence | ACGACTAGCACGATCAGTACGACGACTAACACGACGACGAGCACACCGACTACTACGAGCACGACGACTACTAAAACGAGAAGGAGTACTA |
| | encoding | CAAGCAGCAGACTTCGACGAAAACGGACTAATCAAATCACTACCAAACACACCATGACAACTACGAGCAGCAGCACTAGACCGAAAACTAA |
| | Nme3Cas9 | CACCACTAGAATGATCAGCAGTACTACTACACCTAATCAAACACCGAGGATACCTATCACAACGAAAAAACGAAGGAGAAACAGCAGACAA |
| | cleavase | AGAACTAGGAGCACTACTAAAAGGAGTAGCAGACAACGCACACGCACTACAAACAGGAGACTTCCGAACACCAGCAGAACTAGCACTAAAC |
| | | AAATTCGAAAAAGAATGCGGACACATCCGAAACCAACGAGGAGACTACTCACACACATTCTCACGAAAAGACCTACAAGCAGAACTAAACC |
| | | TACTATTCGAAAAACAAAAAGAATTCGGAAACCCACACGTATCAGGAGGACTAAAAGAAGGAATCGAAACACTACTAATGACACAACGACC |
| | | AGCACTATCAGGAGACGCAGTACAAAAAATGCTAGGACACTGCACATTCGAACCAGCAGAACCAAAAGCAGCAAAAAACACATACACAGCA |
| | | GAACGATTCATCTGACTAACAAAACTAAACAACCTACGAATCCTAGAACAAGGATCAGAACGACCACTAACAGACACAGAACGAGCAACAC |
| | | TAATGGACGAACCATACCGAAAATCAAAACTAACATACGCACAAGCACGAAAACTACTATCACTAGAAGACACAGCATTCTTCAAAGGACT |
| | | ACGATACGGAAAAGACAACGCAGAAGCATCAACACTAATGGAAATGAAAGCATACCACACAATCTCACGAGCACTAGAAAAAGAAGGACTA |
| | | AAAGACAAAAAATCACCACTAAACCTATCACCAGAACTACAAGACGAAATCGGAACAGCATTCTCACTATTCAAAACAGACGAAGACATCA |
| | | CAGGACGACTAAAAGACCGAATCCAACCAGAAATCCTAGAAGCACTACTAAAACACATCTCATTCGACAAATTCGTACAAATCTCACTAAA |
| | | AGCACTACGACGAATCGTACCACTAATGGAACAAGGAAAACGATACGACGAAGCATGCGCAGAAATCTACGGAGACCACTACGGAAAAAAA |
| | | AACACAGAAGAAAAAATCTACCTACCACCAATCCCAGCAGACGAAATCCGAAACCCAGTAGTACTACGAGCACTATCACAAGCACGAAAAG |
| | | TAATCAACGGAGTAGTACGACGATACGGATCACCAGCACGAATCCACATCGAAACAGCACGAGAAGTAGGAAAATCATTCAAAGACCGAAA |
| | | AGAAATCGAAAAACGACAAGAAGAAAACCGAAAAGACCGAGAAAAAGCAGCAGCAAAATTCCGAGAATACTTCCCAAACTTCGTAGGAGAA |
| | | CCAAAATCAAAAGACATCCTAAAACTACGACTATACGAACAACAACACGGAAAATGCCTATACTCAGGAAAAGAAATCAACCTAGGACGAC |
| | | TAAACGAAAAAGGATACGTAGAAATCGACCACGCACTACCATTCTCACGAACATGAGACGACTCATTCAACAACAAAGTACTAGTACTAGG |
| | | ATCAGAAAACCAAAACAAAGGAAACCAAACACCATACGAATACTTCAACGGAAAAGACAACTCACGAGAATGACAAGAATTCAAAGCACGA |
| | | GTAGAAACATCACGATTCCCACGATCAAAAAAACAACGAATCCTACTACAAAAATTCGACGAAGACGGATTCAAAGAACGAAACCTAAACG |
| | | ACACACGATACGTAAACCGATTCCTATGCCAATTCGTAGCAGACCGAATGCGACTAACAGGAAAAGGAAAAAAACGAGTATTCGCATCAAA |
| | | CGGACAAATCACAAACCTACTACGAGGATTCTGAGGACTACGAAAAGTACGAGCAGAAAACGACCGACACCACGCACTAGACGCAGTAGTA |
| | | GTAGCATGCTCAACAGTAGCAATGCAACAAAAAATCACACGATTCGTACGATACAAAGAAATGAACGCATTCGACGGAAAAACAATCGACA |
| | | AAGAAACAGGAGAAGTACTACACCAAAAAACACACTTCCCACAACCATGAGAATTCTTCGCACAAGAAGTAATGATCCGAGTATTCGGAAA |
| | | ACCAGACGGAAAACCAGAATTCGAAGAAGCAGACACACCAGAAAAACTACGAACACTACTAGCAGAAAAACTATCATCACGACCAGAAGCA |
| | | GTACACGAATACGTAACACCACTATTCGTATCACGAGCACCAAACCGAAAAATGTCAGGACAAGGACACATGGAAACAGTAAAATCAGCAA |
| | | AACGACTAGACGAAGGAGTATCAGTACTACGAGTACCACTAACACAACTAAAACTAAAAGACCTAGAAAAAATGGTAAACCGAGAACGAGA |
| | | ACCAAAACTATACGAAGCACTAAAAGCACGACTAGAAGCACACAAAGACGACCCAGCAAAAGCATTCGCAGAACCATTCTACAAATACGAC |
| | | AAAGCAGGAAACCGAACACAACAAGTAAAAGCAGTACGAGTAGAACAAGTACAAAAAACAGGAGTATGAGTACGAAACCACAACGGAATCG |
| | | CAGACAACGCAACAATGGTACGAGTAGACGTATTCGAAAAAGGAGACAAATACTACCTAGTACCAATCTACTCATGACAAGTAGCAAAAGG |
| | | AATCCTACCAGACCGAGCAGTAGTAGCATACGCAGACGAAGAAGACTGAACAGTAATCGACGAATCATTCCGATTCAAATTCGTACTATAC |
| | | TCAAACGACCTAATCAAAGTACAACTAAAAAAAGACTCATTCCTAGGATACTTCTCAGGACTAGACCGAGCAACAGGAGCAATCTCACTAC |
| | | GAGAACACGACCTAGAAAAATCAAAAGGAAAAGACGGAATGCACCGAATCGGAGTAAAAACAGCACTATCATTCCAAAAATACCAAATCGA |
| | | CGAAATGGGAAAAGAAATCCGACCATGCCGACTAAAAAAACGACCACCAGTACGA |
| 131 | Exemplary | ATGGCTGCTTTTAAGCCTAATCCTATTAATTATATTCTTGGTCTTGATATTGGTATTGCTTCTGTTGGTTGGGCTATGGTTGAGATTGATG |
| | open | AGGAGGAGAATCCTATTCGTCTTATTGATCTTGGTGTTCGTGTTTTTGAGCGTGCTGAGGTTCCTAAGACTGGTGATTCTCTTGCTATGGC |
| | reading | TCGTCGTCTTGCTCGTTCTGTTCGTCGTCTTACTCGTCGTCGTGCTCATCGTCTTCTTCGTGCTCGTCGTCTTCTTAAGCGTGAGGGTGTT |
| | frame for | CTTCAGGCTGCTGATTTTGATGAGAATGGTCTTATTAAGTCTCTTCCTAATACTCCTTGGCAGCTTCGTGCTGCTGCTCTTGATCGTAAGC |
| | Nme3Cas9 | TTACTCCTCTTGAGTGGTCTGCTGTTCTTCTTCATCTTATTAAGCATCGTGGTTATCTTTCTCAGCGTAAGAATGAGGGTGAGACTGCTGA |
| | cleavase | TAAGGAGCTTGGTGCTCTTCTTAAGGGTGTTGCTGATAATGCTCATGCTCTTCAGACTGGTGATTTTCGTACTCCTGCTGAGCTTGCTCTT |
| | | AATAAGTTTGAGAAGGAGTGTGGTCATATTCGTAATCAGCGTGGTGATTATTCTCATACTTTTTCTCGTAAGGATCTTCAGGCTGAGCTTA |
| | | ATCTTCTTTTTGAGAAGCAGAAGGAGTTTGGTAATCCTCATGTTTCTGGTGGTCTTAAGGAGGGTATTGAGACTCTTCTTATGACTCAGCG |
| | | TCCTGCTCTTTCTGGTGATGCTGTTCAGAAGATGCTTGGTCATTGTACTTTTGAGCCTGCTGAGCCTAAGGCTGCTAAGAATACTTATACT |
| | | GCTGAGCGTTTTATTTGGCTTACTAAGCTTAATAATCTTCGTATTCTTGAGCAGGGTTCTGAGCGTCCTCTTACTGATACTGAGCGTGCTA |
| | | CTCTTATGGATGAGCCTTATCGTAAGTCTAAGCTTACTTATGCTCAGGCTCGTAAGCTTCTTTCTCTTGAGGATACTGCTTTTTTTAAGGG |
| | | TCTTCGTTATGGTAAGGATAATGCTGAGGCTTCTACTCTTATGGAGATGAAGGCTTATCATACTATTTCTCGTGCTCTTGAGAAGGAGGGT |
| | | CTTAAGGATAAGAAGTCTCCTCTTAATCTTTCTCCTGAGCTTCAGGATGAGATTGGTACTGCTTTTTCTCTTTTTAAGACTGATGAGGATA |
| | | TTACTGGTCGTCTTAAGGATCGTATTCAGCCTGAGATTCTTGAGGCTCTTCTTAAGCATATTTCTTTTGATAAGTTTGTTCAGATTTCTCT |
| | | TAAGGCTCTTCGTCGTATTGTTCCTCTTATGGAGCAGGGTAAGCGTTATGATGAGGCTTGTGCTGAGATTTATGGTGATCATTATGGTAAG |
| | | AAGAATACTGAGGAGAAGATTTATCTTCCTCCTATTCCTGCTGATGAGATTCGTAATCCTGTTGTTCTTCGTGCTCTTTCTCAGGCTCGTA |
| | | AGGTTATTAATGGTGTTGTTCGTCGTTATGGTTCTCCTGCTCGTATTCATATTGAGACTGCTCGTGAGGTTGGTAAGTCTTTTAAGGATCG |
| | | TAAGGAGATTGAGAAGCGTCAGGAGGAGAATCGTAAGGATCGTGAGAAGGCTGCTGCTAAGTTTCGTGAGTATTTTCCTAATTTTGTTGGT |
| | | GAGCCTAAGTCTAAGGATATTCTTAAGCTTCGTCTTTATGAGCAGCAGCATGGTAAGTGTCTTTATTCTGGTAAGGAGATTAATCTTGGTC |
| | | GTCTTAATGAGAAGGGTTATGTTGAGATTGATCATGCTCTTCCTTTTTCTCGTACTTGGGATGATTCTTTTAATAATAAGGTTCTTGTTCT |
| | | TGGTTCTGAGAATCAGAATAAGGGTAATCAGACTCCTTATGAGTATTTTAATGGTAAGGATAATTCTCGTGAGTGGCAGGAGTTTAAGGCT |
| | | CGTGTTGAGACTTCTCGTTTTCCTCGTTCTAAGAAGCAGCGTATTCTTCTTCAGAAGTTTGATGAGGATGGTTTTAAGGAGCGTAATCTTA |
| | | ATGATACTCGTTATGTTAATCGTTTTCTTTGTCAGTTTGTTGCTGATCGTATGCGTCTTACTGGTAAGGGTAAGAAGCGTGTTTTTGCTTC |
| | | TAATGGTCAGATTACTAATCTTCTTCGTGGTTTTTGGGGTCTTCGTAAGGTTCGTGCTGAGAATGATCGTCATCATGCTCTTGATGCTGTT |
| | | GTTGTTGCTTGTTCTACTGTTGCTATGCAGCAGAAGATTACTCGTTTTGTTCGTTATAAGGAGATGAATGCTTTTGATGGTAAGACTATTG |
| | | ATAAGGAGACTGGTGAGGTTCTTCATCAGAAGACTCATTTTCCTCAGCCTTGGGAGTTTTTTGCTCAGGAGGTTATGATTCGTGTTTTTGG |
| | | TAAGCCTGATGGTAAGCCTGAGTTTGAGGAGGCTGATACTCCTGAGAAGCTTCGTACTCTTCTTGCTGAGAAGCTTTCTTCTCGTCCTGAG |
| | | GCTGTTCATGAGTATGTTACTCCTCTTTTTGTTTCTCGTGCTCCTAATCGTAAGATGTCTGGTCAGGGTCATATGGAGACTGTTAAGTCTG |
| | | CTAAGCGTCTTGATGAGGGTGTTTCTGTTCTTCGTGTTCCTCTTACTCAGCTTAAGCTTAAGGATCTTGAGAAGATGGTTAATCGTGAGCG |
| | | TGAGCCTAAGCTTTATGAGGCTCTTAAGGCTCGTCTTGAGGCTCATAAGGATGATCCTGCTAAGGCTTTTGCTGAGCCTTTTTATAAGTAT |
| | | GATAAGGCTGGTAATCGTACTCAGCAGGTTAAGGCTGTTCGTGTTGAGCAGGTTCAGAAGACTGGTGTTTGGGTTCGTAATCATAATGGTA |
| | | TTGCTGATAATGCTACTATGGTTCGTGTTGATGTTTTTGAGAAGGGTGATAAGTATTATCTTGTTCCTATTTATTCTTGGCAGGTTGCTAA |
| | | GGGTATTCTTCCTGATCGTGCTGTTGTTGCTTATGCTGATGAGGAGGATTGGACTGTTATTGATGAGTCTTTTCGTTTTAAGTTTGTTCTT |
| | | TATTCTAATGATCTTATTAAGGTTCAGCTTAAGAAGGATTCTTTTCTTGGTTATTTTTCTGGTCTTGATCGTGCTACTGGTGCTATTTCTC |
| | | TTCGTGAGCATGATCTTGAGAAGTCTAAGGGTAAGGATGGTATGCATCGTATTGGTGTTAAGACTGCTCTTTCTTTTCAGAAGTATCAGAT |
| | | TGATGAGATGGGTAAGGAGATTCGTCCTTGTCGTCTTAAGAAGCGTCCTCCTGTTCGTUGA |
| 132 | Exemplary | ATGGCCGCCTTCAAGCCCAACCCCATCAACTACATCCTGGGCCTGGACATCGGCATCGCCTCCGTGGGCTGGGCCATGGTGGAGATCGACG |
| | open | AGGAGGAGAACCCCATCCGGCTGATCGACCTGGGCGTGCGGGTGTTCGAGCGGGCCGAGGTGCCCAAGACCGGCGACTCCCTGGCCATGGC |
| | reading | CCGGCGGCTGGCCCGGTCCGTGCGGCGGCTGACCCGGCGGCGGGCCCACCGGCTGCTGCGGGCCCGGCGGCTGCTGAAGCGGGAGGGCGTG |
| | frame | CTGCAGGCCGCCGACTTCGACGAGAACGGCCTGATCAAGTCCCTGCCCAACACCCCCTGGCAGCTGCGGGCCGCCGCCCTGGACCGGAAGC |
| | for | TGACCCCCCTGGAGTGGTCCGCCGTGCTGCTGCACCTGATCAAGCACCGGGGCTACCTGTCCCAGCGGAAGAACGAGGGCGAGACCGCCGA |
| | Nme3Cas9 | CAAGGAGCTGGGCGCCCTGCTGAAGGGCGTGGCCGACAACGCCCACGCCCTGCAGACCGGCGACTTCCGGACCCCCGCCGAGCTGGCCCTG |
| | cleavase | AACAAGTTCGAGAAGGAGTGCGGCCACATCCGGAACCAGCGGGGCGACTACTCCCACACCTTCTCCCGGAAGGACCTGCAGGCCGAGCTGA |
| | | ACCTGCTGTTCGAGAAGCAGAAGGAGTTCGGCAACCCCCACGTGTCCGGCGGCCTGAAGGAGGGCATCGAGACCCTGCTGATGACCCAGCG |
| | | GCCCGCCCTGTCCGGCGACGCCGTGCAGAAGATGCTGGGCCACTGCACCTTCGAGCCCGCCGAGCCCAAGGCCGCCAAGAACACCTACACC |
| | | GCCGAGCGGTTCATCTGGCTGACCAAGCTGAACAACCTGCGGATCCTGGAGCAGGGCTCCGAGCGGCCCCTGACCGACACCGAGCGGGCCA |
| | | CCCTGATGGACGAGCCCTACCGGAAGTCCAAGCTGACCTACGCCCAGGCCCGGAAGCTGCTGTCCCTGGAGGACACCGCCTTCTTCAAGGG |
| | | CCTGCGGTACGGCAAGGACAACGCCGAGGCCTCCACCCTGATGGAGATGAAGGCCTACCACACCATCTCCCGGGCCCTGGAGAAGGAGGGC |
| | | CTGAAGGACAAGAAGTCCCCCCTGAACCTGTCCCCCGAGCTGCAGGACGAGATCGGCACCGCCTTCTCCCTGTTCAAGACCGACGAGGACA |
| | | TCACCGGCCGGCTGAAGGACCGGATCCAGCCCGAGATCCTGGAGGCCCTGCTGAAGCACATCTCCTTCGACAAGTTCGTGCAGATCTCCCT |
| | | GAAGGCCCTGCGGCGGATCGTGCCCCTGATGGAGCAGGGCAAGCGGTACGACGAGGCCTGCGCCGAGATCTACGGCGACCACTACGGCAAG |
| | | AAGAACACCGAGGAGAAGATCTACCTGCCCCCCATCCCCGCCGACGAGATCCGGAACCCCGTGGTGCTGCGGGCCCTGTCCCAGGCCCGGA |
| | | AGGTGATCAACGGCGTGGTGCGGCGGTACGGCTCCCCCGCCCGGATCCACATCGAGACCGCCCGGGAGGTGGGCAAGTCCTTCAAGGACCG |
| | | GAAGGAGATCGAGAAGCGGCAGGAGGAGAACCGGAAGGACCGGGAGAAGGCCGCCGCCAAGTTCCGGGAGTACTTCCCCAACTTCGTGGGC |
| | | GAGCCCAAGTCCAAGGACATCCTGAAGCTGCGGCTGTACGAGCAGCAGCACGGCAAGTGCCTGTACTCCGGCAAGGAGATCAACCTGGGCC |
| | | GGCTGAACGAGAAGGGCTACGTGGAGATCGACCACGCCCTGCCCTTCTCCCGGACCTGGGACGACTCCTTCAACAACAAGGTGCTGGTGCT |
| | | GGGCTCCGAGAACCAGAACAAGGGCAACCAGACCCCCTACGAGTACTTCAACGGCAAGGACAACTCCCGGGAGTGGCAGGAGTTCAAGGCC |
| | | CGGGTGGAGACCTCCCGGTTCCCCCGGTCCAAGAAGCAGCGGATCCTGCTGCAGAAGTTCGACGAGGACGGCTTCAAGGAGCGGAACCTGA |
| | | ACGACACCCGGTACGTGAACCGGTTCCTGTGCCAGTTCGTGGCCGACCGGATGCGGCTGACCGGCAAGGGCAAGAAGCGGGTGTTCGCCTC |
| | | CAACGGCCAGATCACCAACCTGCTGCGGGGCTTCTGGGGCCTGCGGAAGGTGCGGGCCGAGAACGACCGGCACCACGCCCTGGACGCCGTG |
| | | GTGGTGGCCTGCTCCACCGTGGCCATGCAGCAGAAGATCACCCGGTTCGTGCGGTACAAGGAGATGAACGCCTTCGACGGCAAGACCATCG |
| | | ACAAGGAGACCGGCGAGGTGCTGCACCAGAAGACCCACTTCCCCCAGCCCTGGGAGTTCTTCGCCCAGGAGGTGATGATCCGGGTGTTCGG |
| | | CAAGCCCGACGGCAAGCCCGAGTTCGAGGAGGCCGACACCCCCGAGAAGCTGCGGACCCTGCTGGCCGAGAAGCTGTCCTCCCGGCCCGAG |
| | | GCCGTGCACGAGTACGTGACCCCCCTGTTCGTGTCCCGGGCCCCCAACCGGAAGATGTCCGGCCAGGGCCACATGGAGACCGTGAAGTCCG |
| | | CCAAGCGGCTGGACGAGGGCGTGTCCGTGCTGCGGGTGCCCCTGACCCAGCTGAAGCTGAAGGACCTGGAGAAGATGGTGAACCGGGAGCG |
| | | GGAGCCCAAGCTGTACGAGGCCCTGAAGGCCCGGCTGGAGGCCCACAAGGACGACCCCGCCAAGGCCTTCGCCGAGCCCTTCTACAAGTAC |
| | | GACAAGGCCGGCAACCGGACCCAGCAGGTGAAGGCCGTGCGGGTGGAGCAGGTGCAGAAGACCGGCGTGTGGGTGCGGAACCACAACGGCA |
| | | TCGCCGACAACGCCACCATGGTGCGGGTGGACGTGTTCGAGAAGGGCGACAAGTACTACCTGGTGCCCATCTACTCCTGGCAGGTGGCCAA |
| | | GGGCATCCTGCCCGACCGGGCCGTGGTGGCCTACGCCGACGAGGAGGACTGGACCGTGATCGACGAGTCCTTCCGGTTCAAGTTCGTGCTG |
| | | TACTCCAACGACCTGATCAAGGTGCAGCTGAAGAAGGACTCCTTCCTGGGCTACTTCTCCGGCCTGGACCGGGCCACCGGCGCCATCTCCC |
| | | TGCGGGAGCACGACCTGGAGAAGTCCAAGGGCAAGGACGGCATGCACCGGATCGGCGTGAAGACCGCCCTGTCCTTCCAGAAGTACCAGAT |
| | | CGACGAGATGGGCAAGGAGATCCGGCCCTGCCGGCTGAAGAAGCGGCCCCCCGTGCGGUGA |
| 133 | Exemplary | ATGGCAGCATTCAAACCAAACCCAATCAACTACATCCTAGGACTAGACATCGGAATCGCATCAGTAGGATGAGCAATGGTAGAAATCGACG |
| | open | AAGAAGAAAACCCAATCCGACTAATCGACCTAGGAGTACGAGTATTCGAACGAGCAGAAGTACCAAAAACAGGAGACTCACTAGCAATGGC |
| | reading | ACGACGACTAGCACGATCAGTACGACGACTAACACGACGACGAGCACACCGACTACTACGAGCACGACGACTACTAAAACGAGAAGGAGTA |
| | frame | CTACAAGCAGCAGACTTCGACGAAAACGGACTAATCAAATCACTACCAAACACACCATGACAACTACGAGCAGCAGCACTAGACCGAAAAC |
| | for | TAACACCACTAGAATGATCAGCAGTACTACTACACCTAATCAAACACCGAGGATACCTATCACAACGAAAAAACGAAGGAGAAACAGCAGA |
| | Nme3Cas9 | CAAAGAACTAGGAGCACTACTAAAAGGAGTAGCAGACAACGCACACGCACTACAAACAGGAGACTTCCGAACACCAGCAGAACTAGCACTA |
| | cleavase | AACAAATTCGAAAAAGAATGCGGACACATCCGAAACCAACGAGGAGACTACTCACACACATTCTCACGAAAAGACCTACAAGCAGAACTAA |
| | | ACCTACTATTCGAAAAACAAAAAGAATTCGGAAACCCACACGTATCAGGAGGACTAAAAGAAGGAATCGAAACACTACTAATGACACAACG |
| | | ACCAGCACTATCAGGAGACGCAGTACAAAAAATGCTAGGACACTGCACATTCGAACCAGCAGAACCAAAAGCAGCAAAAAACACATACACA |
| | | GCAGAACGATTCATCTGACTAACAAAACTAAACAACCTACGAATCCTAGAACAAGGATCAGAACGACCACTAACAGACACAGAACGAGCAA |
| | | CACTAATGGACGAACCATACCGAAAATCAAAACTAACATACGCACAAGCACGAAAACTACTATCACTAGAAGACACAGCATTCTTCAAAGG |
| | | ACTACGATACGGAAAAGACAACGCAGAAGCATCAACACTAATGGAAATGAAAGCATACCACACAATCTCACGAGCACTAGAAAAAGAAGGA |
| | | CTAAAAGACAAAAAATCACCACTAAACCTATCACCAGAACTACAAGACGAAATCGGAACAGCATTCTCACTATTCAAAACAGACGAAGACA |
| | | TCACAGGACGACTAAAAGACCGAATCCAACCAGAAATCCTAGAAGCACTACTAAAACACATCTCATTCGACAAATTCGTACAAATCTCACT |
| | | AAAAGCACTACGACGAATCGTACCACTAATGGAACAAGGAAAACGATACGACGAAGCATGCGCAGAAATCTACGGAGACCACTACGGAAAA |
| | | AAAAACACAGAAGAAAAAATCTACCTACCACCAATCCCAGCAGACGAAATCCGAAACCCAGTAGTACTACGAGCACTATCACAAGCACGAA |
| | | AAGTAATCAACGGAGTAGTACGACGATACGGATCACCAGCACGAATCCACATCGAAACAGCACGAGAAGTAGGAAAATCATTCAAAGACCG |
| | | AAAAGAAATCGAAAAACGACAAGAAGAAAACCGAAAAGACCGAGAAAAAGCAGCAGCAAAATTCCGAGAATACTTCCCAAACTTCGTAGGA |
| | | GAACCAAAATCAAAAGACATCCTAAAACTACGACTATACGAACAACAACACGGAAAATGCCTATACTCAGGAAAAGAAATCAACCTAGGAC |
| | | GACTAAACGAAAAAGGATACGTAGAAATCGACCACGCACTACCATTCTCACGAACATGAGACGACTCATTCAACAACAAAGTACTAGTACT |
| | | AGGATCAGAAAACCAAAACAAAGGAAACCAAACACCATACGAATACTTCAACGGAAAAGACAACTCACGAGAATGACAAGAATTCAAAGCA |
| | | CGAGTAGAAACATCACGATTCCCACGATCAAAAAAACAACGAATCCTACTACAAAAATTCGACGAAGACGGATTCAAAGAACGAAACCTAA |
| | | ACGACACACGATACGTAAACCGATTCCTATGCCAATTCGTAGCAGACCGAATGCGACTAACAGGAAAAGGAAAAAAACGAGTATTCGCATC |
| | | AAACGGACAAATCACAAACCTACTACGAGGATTCTGAGGACTACGAAAAGTACGAGCAGAAAACGACCGACACCACGCACTAGACGCAGTA |
| | | GTAGTAGCATGCTCAACAGTAGCAATGCAACAAAAAATCACACGATTCGTACGATACAAAGAAATGAACGCATTCGACGGAAAAACAATCG |
| | | ACAAAGAAACAGGAGAAGTACTACACCAAAAAACACACTTCCCACAACCATGAGAATTCTTCGCACAAGAAGTAATGATCCGAGTATTCGG |
| | | AAAACCAGACGGAAAACCAGAATTCGAAGAAGCAGACACACCAGAAAAACTACGAACACTACTAGCAGAAAAACTATCATCACGACCAGAA |
| | | GCAGTACACGAATACGTAACACCACTATTCGTATCACGAGCACCAAACCGAAAAATGTCAGGACAAGGACACATGGAAACAGTAAAATCAG |
| | | CAAAACGACTAGACGAAGGAGTATCAGTACTACGAGTACCACTAACACAACTAAAACTAAAAGACCTAGAAAAAATGGTAAACCGAGAACG |
| | | AGAACCAAAACTATACGAAGCACTAAAAGCACGACTAGAAGCACACAAAGACGACCCAGCAAAAGCATTCGCAGAACCATTCTACAAATAC |
| | | GACAAAGCAGGAAACCGAACACAACAAGTAAAAGCAGTACGAGTAGAACAAGTACAAAAAACAGGAGTATGAGTACGAAACCACAACGGAA |
| | | TCGCAGACAACGCAACAATGGTACGAGTAGACGTATTCGAAAAAGGAGACAAATACTACCTAGTACCAATCTACTCATGACAAGTAGCAAA |
| | | AGGAATCCTACCAGACCGAGCAGTAGTAGCATACGCAGACGAAGAAGACTGAACAGTAATCGACGAATCATTCCGATTCAAATTCGTACTA |
| | | TACTCAAACGACCTAATCAAAGTACAACTAAAAAAAGACTCATTCCTAGGATACTTCTCAGGACTAGACCGAGCAACAGGAGCAATCTCAC |
| | | TACGAGAACACGACCTAGAAAAATCAAAAGGAAAAGACGGAATGCACCGAATCGGAGTAAAAACAGCACTATCATTCCAAAAATACCAAAT |
| | | CGACGAAATGGGAAAAGAAATCCGACCATGCCGACTAAAAAAACGACCACCAGTACGAUAA |
| 134 | Exemplary | GGGAAGCUCAGAAUAAACGCUCAACUUUGGCCGGAUCUGCCACCAUGGACGGCUCCGGCGGCGGCUCCCCCAAGAAGAAGCGGAAGGUGGA |
| | coding | GGACAAGCGGCCCGCCGCCACCAAGAAGGCCGGCCAGGCCAAGAAGAAGAAGGGCGGCUCCGGGGGGGGCGCCGCCUUCAAGCCCAACCCC |
| | sequence | AUCAACUACAUCCUGGGCCUGGACAUCGGCAUCGCCUCCGUGGGCUGGGCCAUGGUGGAGAUCGACGAGGAGGAGAACCCCAUCCGGCUGA |
| | encoding | UCGACCUGGGCGUGCGGGUGUUCGAGCGGGCCGAGGUGCCCAAGACCGGCGACUCCCUGGCCAUGGCCCGGCGGCUGGCCCGGUCCGUGCG |
| | Nme2Cas9 | GCGGCUGACCCGGCGGCGGGCCCACCGGCUGCUGCGGGCCCGGCGGCUGCUGAAGCGGGAGGGCGUGCUGCAGGCCGCCGACUUCGACGAG |
| | (mRNA | AACGGCCUGAUCAAGUCCCUGCCCAACACCCCCUGGCAGCUGCGGGCCGCCGCCCUGGACCGGAAGCUGACCCCCCUGGAGUGGUCCGCCG |
| | AA) | UGCUGCUGCACCUGAUCAAGCACCGGGGCUACCUGUCCCAGCGGAAGAACGAGGGCGAGACCGCCGACAAGGAGCUGGGCGCCCUGCUGAA |
| | | GGGCGUGGCCAACAACGCCCACGCCCUGCAGACCGGCGACUUCCGGACCCCCGCCGAGCUGGCCCUGAACAAGUUCGAGAAGGAGUCCGGC |
| | | CACAUCCGGAACCAGCGGGGCGACUACUCCCACACCUUCUCCCGGAAGGACCUGCAGGCCGAGCUGAUCCUGCUGUUCGAGAAGCAGAAGG |
| | | AGUUCGGCAACCCCCACGUGUCCGGCGGCCUGAAGGAGGGCAUCGAGACCCUGCUGAUGACCCAGCGGCCCGCCCUGUCCGGCGACGCCGU |
| | | GCAGAAGAUGCUGGGCCACUGCACCUUCGAGCCCGCCGAGCCCAAGGCCGCCAAGAACACCUACACCGCCGAGCGGUUCAUCUGGCUGACC |
| | | AAGCUGAACAACCUGCGGAUCCUGGAGCAGGGCUCCGAGCGGCCCCUGACCGACACCGAGCGGGCCACCCUGAUGGACGAGCCCUACCGGA |
| | | AGUCCAAGCUGACCUACGCCCAGGCCCGGAAGCUGCUGGGCCUGGAGGACACCGCCUUCUUCAAGGGCCUGCGGUACGGCAAGGACAACGC |
| | | CGAGGCCUCCACCCUGAUGGAGAUGAAGGCCUACCACGCCAUCUCCCGGGCCCUGGAGAAGGAGGGCCUGAAGGACAAGAAGUCCCCCCUG |
| | | AACCUGUCCUCCGAGCUGCAGGACGAGAUCGGCACCGCCUUCUCCCUGUUCAAGACCGACGAGGACAUCACCGGCCGGCUGAAGGACCGGG |
| | | UGCAGCCCGAGAUCCUGGAGGCCCUGCUGAAGCACAUCUCCUUCGACAAGUUCGUGCAGAUCUCCCUGAAGGCCCUGCGGCGGAUCGUGCC |
| | | CCUGAUGGAGCAGGGCAAGCGGUACGACGAGGCCUGCGCCGAGAUCUACGGCGACCACUACGGCAAGAAGAACACCGAGGAGAAGAUCUAC |
| | | CUGCCCCCCAUCCCCGCCGACGAGAUCCGGAACCCCGUGGUGCUGCGGGCCCUGUCCCAGGCCCGGAAGGUGAUCAACGGCGUGGUGCGGC |
| | | GGUACGGCUCCCCCGCCCGGAUCCACAUCGAGACCGCCCGGGAGGUGGGCAAGUCCUUCAAGGACCGGAAGGAGAUCGAGAAGCGGCAGGA |
| | | GGAGAACCGGAAGGACCGGGAGAAGGCCGCCGCCAAGUUCCGGGAGUACUUCCCCAACUUCGUGGGCGAGCCCAAGUCCAAGGACAUCCUG |
| | | AAGCUGCGGCUGUACGAGCAGCAGCACGGCAAGUGCCUGUACUCCGGCAAGGAGAUCAACCUGGUGCGGCUGAACGAGAAGGGCUACGUGG |
| | | AGAUCGACCACGCCCUGCCCUUCUCCCGGACCUGGGACGACUCCUUCAACAACAAGGUGCUGGUGCUGGGCUCCGAGAACCAGAACAAGGG |
| | | CAACCAGACCCCCUACGAGUACUUCAACGGCAAGGACAACUCCCGGGAGUGGCAGGAGUUCAAGGCCCGGGUGGAGACCUCCCGGUUCCCC |
| | | CGGUCCAAGAAGCAGCGGAUCCUGCUGCAGAAGUUCGACGAGGACGGCUUCAAGGAGUGCAACCUGAACGACACCCGGUACGUGAACCGGU |
| | | UCCUGUGCCAGUUCGUGGCCGACCACAUCCUGCUGACCGGCAAGGGCAAGCGGCGGGUGUUCGCCUCCAACGGCCAGAUCACCAACCUGCU |
| | | GCGGGGCUUCUGGGGCCUGCGGAAGGUGCGGGCCGAGAACGACCGGCACCACGCCCUGGACGCCGUGGUGGUGGCCUGCUCCACCGUGGCC |
| | | AUGCAGCAGAAGAUCACCCGGUUCGUGCGGUACAAGGAGAUGAACGCCUUCGACGGCAAGACCAUCGACAAGGAGACCGGCAAGGUGCUGC |
| | | ACCAGAAGACCCACUUCCCCCAGCCCUGGGAGUUCUUCGCCCAGGAGGUGAUGAUCCGGGUGUUCGGCAAGCCCGACGGCAAGCCCGAGUU |
| | | CGAGGAGGCCGACACCCCCGAGAAGCUGCGGACCCUGCUGGCCGAGAAGCUGUCCUCCCGGCCCGAGGCCGUGCACGAGUACGUGACCCCC |
| | | CUGUUCGUGUCCCGGGCCCCCAACCGGAAGAUGUCCGGCGCCCACAAGGACACCCUGCGGUCCGCCAAGCGGUUCGUGAAGCACAACGAGA |
| | | AGAUCUCCGUGAAGCGGGUGUGGCUGACCGAGAUCAAGCUGGCCGACCUGGAGAACAUGGUGAACUACAAGAACGGCCGGGAGAUCGAGCU |
| | | GUACGAGGCCCUGAAGGCCCGGCUGGAGGCCUACGGCGGCAACGCCAAGCAGGCCUUCGACCCCAAGGACAACCCCUUCUACAAGAAGGGC |
| | | GGCCAGCUGGUGAAGGCCGUGCGGGUGGAGAAGACCCAGGAGUCCGGCGUGCUGCUGAACAAGAAGAACGCCUACACCAUCGCCGACAACG |
| | | GCGACAUGGUGCGGGUGGACGUGUUCUGCAAGGUGGACAAGAAGGGCAAGAACCAGUACUUCAUCGUGCCCAUCUACGCCUGGCAGGUGGC |
| | | CGAGAACAUCCUGCCCGACAUCGACUGCAAGGGCUACCGGAUCGACGACUCCUACACCUUCUGCUUCUCCCUGCACAAGUACGACCUGAUC |
| | | GCCUUCCAGAAGGACGAGAAGUCCAAGGUGGAGUUCGCCUACUACAUCAACUGCGACUCCUCCAACGGCCGGUUCUACCUGGCCUGGCACG |
| | | ACAAGGGCUCCAAGGAGCAGCAGUUCCGGAUCUCCACCCAGAACCUGGUGCUGAUCCAGAAGUACCAGGUGAACGAGCUGGGCAAGGAGAU |
| | | CCGGCCCUGCCGGCUGAAGAAGCGGCCCCCCGUGCGGUAGCUAGCACCAGCCUCAAGAACACCCGAAUGGAGUCUCUAAGCUACAUAAUAC |
| | | CAACUUACACUUUACAAAAUGUUGUCCCCCAAAAUGUAGCCAUUCGUAUCUGCUCCUAAUAAAAAGAAAGUUUCUUCACAUUCUCAAAAAA |
| | | AAAAAAAAAAAAAAAAAAAAAAAAAAAAAAAAAAAAAAAAAAAAAAAAAAAAAAAAAAAAAAAAAAAAAAAAAAAAAAAAAAAAAAAAAAA |
| | | AAAAAAAAAAAAAAAAAAAAAAAAAAAAAAAAAAAAAAAAAAAAAAAAAAAAAAAAAAAAAAAAAAAAAAAAAAAAAAAAAAAAAAAAAAA |
| | | AAAAAAAAAAAAAAAAAAAAAAAAAAAAAAAAAAAAAAAAAAAAAAAAA |
| 135 | Exemplary | GGGUCCCGCAGUCGGCGUCCAGCGGCUCUGCUUGUUCGUGUGUGUGUCGUUGCAGGCCUUAUUCGGAUCCGCCACCAUGGCAGCAUUCAAG |
| | coding | CCGAACUCGAUCAACUACAUCCUGGGACUGGACAUCGGAAUCGCAUCGGUCGGAUGGGCAAUGGUCGAAAUCGACGAAGAAGAAAACCCGA |
| | sequence | UCAGACUGAUCGACCUGGGAGUCAGAGUCUUCGAAAGAGCAGAAGUCCCGAAGACAGGAGACUCGCUGGCAAUGGCAAGAAGACUGGCAAG |
| | encoding | AUCGGUCAGAAGACUGACAAGAAGAAGAGCACACAGACUGCUGAGAACAAGAAGACUGCUGAAGAGAGAAGGAGUCCUGCAGGCAGCAAAC |
| | Nme1Cas9 | UUCGACGAAAACGGACUGAUCAAGUCGCUGCCGAACACACCGUGGCAGCUGAGAGCAGCAGCACUGGACAGAAAGCUGACACCGCUGGAAU |
| | (mRNA | GGUCGGCAGUCCUGCUGCACCUGAUCAAGCACAGAGGAUACCUGUCGCAGAGAAAGAACGAAGGAGAAACAGCAGACAAGGAACUGGGAGC |
| | AB) | ACUGCUGAAGGGAGUCGCAGGAAACGCACACGCACUGCAGACAGGAGACUUCAGAACACCGGCAGAACUGGCACUGAACAAGUUCGAAAAG |
| | | GAAUCGGGACACAUCAGAAACCAGAGAUCGGACUACUCGCACACAUUCUCGAGAAAGGACCUGCAGGCAGAACUGAUCCUGCUGUUCGAAA |
| | | AGCAGAAGGAAUUCGGAAACCCGCACGUCUCGGGAGGACUGAAGGAAGGAAUCGAAACACUGCUGAUGACACAGAGACCGGCACUGUCGGG |
| | | AGACGCAGUCCAGAAGAUGCUGGGACACUGCACAUUCGAACCGGCAGAACCGAAGGCAGCAAAGAACACAUACACAGCAGAAAGAUUCAUC |
| | | UGGCUGACAAAGCUGAACAACCUGAGAAUCCUGGAACAGGGAUCGGAAAGACCGCUGACAGACACAGAAAGAGCAACACUGAUGGACGAAC |
| | | CGUACAGAAAGUCGAAGCUGACAUACGCACAGGCAAGAAAGCUGCUGGGACUGGAAGACACAGCAUUCUUCAAGGGACUGAGAUACGGAAA |
| | | GGACAACGCAGAAGCAUCGACACUGAUGGAAAUGAAGGCAUACCACGCAAUCUCGAGAGCACUGGAAAAGGAAGGACUGAAGGACAAGAAG |
| | | UCGCCGCUGAACCUGUCGCCGGAACUGCAGGACGAAAUCGGAACAGCAUUCUCGCUGUUCAAGACAGACGAAGACAUCACAGGAAGACUGA |
| | | AGGACAGAAUCCAGCCGGAAAUCCUGGAAGCACUGCUGAAGCACAUCUCGUUCGACAAGUUCGUCCAGAUCUCGCUGAAGGCACUGAGAAG |
| | | AAUCGUCCCGCUGAUGGAACAGGGAAAGAGAUACGACGAAGCAUGCGCAGAAAUCUACGGAGACCACUACGGAAAGAAGAACACAGAAGAA |
| | | AAGAUCUACCUGCCGCCGAUCCCGGCAGACGAAAUCAGAAACCCGGUCGUCCUGAGAGCACUGUCGCAGGCAAGAAAGGUCAUCAACGGAG |
| | | UCGUCAGAAGAUACGGAUCGCCGGCAAGAAUCCACAUCGAAACAGCAAGAGAAGUCGGAAAGUCGUUCAAGGACAGAAAGGAAAUCGAAAA |
| | | GAGACAGGAAGAAAACAGAAAGGACAGAGAAAAGGCAGCAGCAAAGUUCAGAGAAUACUUCCCGAACUUCGUCGGAGAACCGAAGUCGAAG |
| | | GACAUCCUGAAGCUGAGACUGUACGAACAGCAGCACGGAAAGUGCCUGUACUCGGGAAAGGAAAUCAACCUGGGAAGACUGAACGAAAAGG |
| | | GAUACGUCGAAAUCGACCACGCACUGCCGUUCUCGAGAACAUGGGACGACUCGUUCAACAACAAGGUCCUGGUCCUGGGAUCGGAAAACCA |
| | | GAACAAGGGAAACCAGACACCGUACGAAUACUUCAACGGAAAGGACAACUCGAGAGAAUGGCAGGAAUUCAAGGCAAGAGUCGAAACAUCG |
| | | AGAUUCCCGAGAUCGAAGAAGCAGAGAAUCCUGCUGCAGAAGUUCGACGAAGACGGAUUCAAGGAAAGAAACCUGAACGACACAAGAUACG |
| | | UCAACAGAUUCCUGUGCCAGUUCGUCGCAGACAGAAUGAGACUGACAGGAAAGGGAAAGAAGAGAGUCUUCGCAUCGAACGGACAGAUCAC |
| | | AAACCUGCUGAGAGGAUUCUGGGGACUGAGAAAGGUCAGAGCAGAAAACGACAGACACCACGCACUGGACGCAGUCGUCGUCGCAUGCUCG |
| | | ACAGUCGCAAUGCAGCAGAAGAUCACAAGAUUCGUCAGAUACAAGGAAAUGAACGCAUUCGACGGAAAGACAAUCGACAAGGAAACAGGAG |
| | | AAGUCCUGCACCAGAAGACACACUUCCCGCAGCCGUGGGAAUUCUUCGCACAGGAAGUCAUGAUCAGAGUCUUCGGAAAGCCGGACGGAAA |
| | | GCCGGAAUUCGAAGAAGCAGACACACUGGAAAAGCUGAGAACACUGCUGGCAGAAAAGCUGUCGUCGAGACCGGAAGCAGUCCACGAAUAC |
| | | GUCACACCGCUGUUCGUCUCGAGAGCACCGAACAGAAAGAUGUCGGGACAGGGACACAUGGAAACAGUCAAGUCGGCAAAGAGACUGGACG |
| | | AAGGAGUCUCGGUCCUGAGAGUCCCGCUGACACAGCUGAAGCUGAAGGACCUGGAAAAGAUGGUCAACAGAGAAAGAGAACCGAAGCUGUA |
| | | CGAAGCACUGAAGGCAAGACUGGAAGCACACAAGGACGACCCGGCAAAGGCAUUCGCAGAACCGUUCUACAAGUACGACAAGGCAGGAAAC |
| | | AGAACACAGCAGGUCAAGGCAGUCAGAGUCGAACAGGUCCAGAAGACAGGAGUCUGGGUCAGAAACCACAACGGAAUCGCAGACAACGCAA |
| | | CAAUGGUCAGAGUAGACGUCUUCGAAAAGGGAGACAAGUACUACCUGGUCCCGAUCUACUCGUGGCAGGUCGCAAAGGGAAUCCUGCCGGA |
| | | CAGAGCAGUCGUCCAGGGAAAGGACGAAGAAGACUGGCAGCUGAUCGACGACUCGUUCAACUUCAAGUUCUCGCUGCACCCGAACGACCUG |
| | | GUCGAAGUCAUCACAAAGAAGGCAAGAAUGUUCGGAUACUUCGCAUCGUGCCACAGAGGAACAGGAAACAUCAACAUCAGAAUCCACGACC |
| | | UGGACCACAAGAUCGGAAAGAACGGAAUCCUGGAAGGAAUCGGAGUCAAGACAGCACUGUCGUUCCAGAAGUACCAGAUCGACGAACUGGG |
| | | AAAGGAAAUCAGACCGUGCAGACUGAAGAAGAGACCGCCGGUCAGAUCCGGAAAGAGAACAGCAGACGGAUCGGAAUUCGAAUCGCCGAAG |
| | | AAGAAGAGAAAGGUCGAAUGAUAGCUAGCCAUCACAUUUAAAAGCAUCUCAGCCUACCAUGAGAAUAAGAGAAAGAAAAUGAAGAUCAAUA |
| | | GCUUAUUCAUCUCUUUUUCUUUUUCGUUGGUGUAAAGCCAACACCCUGUCUAAAAAACAUAAAUUUCUUUAAUCAUUUUGCCUCUUUUCUC |
| | | UGUGCUUCAAUUAAUAAAAAAUGGAAAGAACCUCGAGAAAAAAAAAAAAAAAAAAAAAAAAAAAAAAAAAAAAAAAAAAAAAAAAAAAAAA |
| | | AAAAAAAAAAAAAAAAAAAAAAAAAAAAAAAAAAAAAAAUCUAG |
| 136 | Exemplary | MDGSGGGSPKKKRKVEDKRPAATKKAGQAKKKKGGSGGGAAFKPNPINYILGLDIGIASVGWAMVEIDEEENPIRLIDLGVRVFERAEVPK |
| | amino | TGDSLAMARRLARSVRRLTRRRAHRLLRARRLLKREGVLQAADFDENGLIKSLPNTPWQLRAAALDRKLTPLEWSAVLLHLI KHRGYLSQR |
| | acid | KNEGETADKELGALLKGVANNAHALQTGDFRTPAELALNKFEKESGHIRNQRGDYSHTFSRKDLQAELILLFEKQKEFGNPHVSGGLKEGI |
| | sequence | ETLLMTQRPALSGDAVQKMLGHCTFEPAEPKAAKNTYTAERFIWLTKLNNLRILEQGSERPLTDTERATLMDEPYRKSKLTYAQARKLLGL |
| | for | EDTAFFKGLRYGKDNAEASTLMEMKAYHAISRALEKEGLKDKKSPLNLSSELQDEIGTAFSLFKTDEDITGRLKDRVQPEILEALLKHISF |
| | Nme2Cas9 | DKFVQISLKALRRIVPLMEQGKRYDEACAEIYGDHYGKKNTEEKIYLPPIPADEIRNPVVLRALSQARKVINGVVRRYGSPARIHIETARE |
| | (mRNA | VGKSFKDRKEIEKRQEENRKDREKAAAKFREYFPNFVGEPKSKDILKLRLYEQQHGKCLYSGKEINLVRLNEKGYVEIDHALPFSRTWDDS |
| | AA | FNNKVLVLGSENQNKGNQTPYEYFNGKDNSREWQEFKARVETSRFPRSKKQRILLQKFDEDGFKECNLNDTRYVNRFLCQFVADHILLTGK |
| | amino | GKRRVFASNGQITNLLRGFWGLRKVRAENDRHHALDAVVVACSTVAMQQKITRFVRYKEMNAFDGKTIDKETGKVLHQKTHFPQPWEFFAQ |
| | acid) | EVMIRVFGKPDGKPEFEEADTPEKLRTLLAEKLSSRPEAVHEYVTPLFVSRAPNRKMSGAHKDTLRSAKRFVKHNEKI SVKRVWLTEIKLA |
| | | DLENMVNYKNGREIELYEALKARLEAYGGNAKQAFDPKDNPFYKKGGQLVKAVRVEKTQESGVLLNKKNAYTIADNGDMVRVDVFCKVDKK |
| | | GKNQYFIVPIYAWQVAENILPDIDCKGYRIDDSYTFCFSLHKYDLIAFQKDEKSKVEFAYYINCDSSNGRFYLAWHDKGSKEQQFRISTQN |
| | | LVLIQKYQVNELGKEIRPCRLKKRPPVR* |
| 137 | Exemplary | MAAFKPNSINYILGLDIGIASVGWAMVEIDEEENPIRLIDLGVRVFERAEVPKTGDSLAMARRLARSVRRLTRRRAHRLLRTRRLLKREGV |
| | amino | LQAANFDENGLIKSLPNTPWQLRAAALDRKLTPLEWSAVLLHLIKHRGYLSQRKNEGETADKELGALLKGVAGNAHALQTGDFRTPAELAL |
| | acid | NKFEKESGHIRNQRSDYSHTFSRKDLQAELILLFEKQKEFGNPHVSGGLKEGIETLLMTQRPALSGDAVQKMLGHCTFEPAEPKAAKNTYT |
| | sequence | AERFIWLTKLNNLRILEQGSERPLTDTERATLMDEPYRKSKLTYAQARKLLGLEDTAFFKGLRYGKDNAEASTLMEMKAYHAISRALEKEG |
| | for | LKDKKSPLNLSPELQDEIGTAFSLFKTDEDITGRLKDRIQPEILEALLKHISFDKFVQISLKALRRIVPLMEQGKRYDEACAEIYGDHYGK |
| | Nme1Cas9 | KNTEEKIYLPPIPADEIRNPVVLRALSQARKVINGVVRRYGSPARIHIETAREVGKSFKDRKEIEKRQEENRKDREKAAAKFREYFPNFVG |
| | (mRNA | EPKSKDILKLRLYEQQHGKCLYSGKEINLGRLNEKGYVEIDHALPFSRTWDDSFNNKVLVLGSENQNKGNQTPYEYFNGKDNSREWQEFKA |
| | AB | RVETSRFPRSKKQRILLQKFDEDGFKERNLNDTRYVNRFLCQFVADRMRLTGKGKKRVFASNGQITNLLRGFWGLRKVRAENDRHHALDAV |
| | amino | VVACSTVAMQQKITRFVRYKEMNAFDGKTIDKETGEVLHQKTHFPQPWEFFAQEVMIRVFGKPDGKPEFEEADTLEKLRTLLAEKLSSRPE |
| | acid) | AVHEYVTPLFVSRAPNRKMSGQGHMETVKSAKRLDEGVSVLRVPLTQLKLKDLEKMVNREREPKLYEALKARLEAHKDDPAKAFAEPFYKY |
| | | DKAGNRTQQVKAVRVEQVQKTGVWVRNHNGIADNATMVRVDVFEKGDKYYLVPIYSWQVAKGILPDRAVVQGKDEEDWQLIDDSFNFKFSL |
| | | HPNDLVEVITKKARMFGYFASCHRGTGNINIRIHDLDHKIGKNGILEGIGVKTALSFQKYQIDELGKEIRPCRLKKRPPVRSGKRTADGSE |
| | | FESPKKKRKVE* |
| 138 | Exemplary | augGACGGCUCCGGCGGCGGCUCCCCCAAGAAGAAGCGGAAGGUGGAGGACAAGCGGCCCGCCGCCACCAAGAAGGCCGGCCAGGCCAAGA |
| | open | AGAAGAAGGGCGGCUCCGGCGGCGGCgccgccuucaagcccaaccccaucaacuacauccugggccuggacaucggcaucgccuccguggg |
| | reading | cugggccaugguggagaucgacgaggaggagaaccccauccggcugaucgaccugggcgugcggguguucgagcgggccgaggugcccaag |
| | frame | accggcgacucccuggccauggcccggcggcuggcccgguccgugcggcggcugacccggcggcgcggcccaccggcugcuggggcccggc |
| | for | ggcugcugaagcgggagggcgugcugcaggccgccgacuucgacgagaacggccugaucaagucccugcccaacacccccuggcagcugcg |
| | Nme2Cas9 | ggccgccgcccuggaccggaagcugaccccccuggagugguccgccgugcugcugcaccugaucaagcaccggggcuaccugucccagcgg |
| | (mRNA | aagaacgagggcgagaccgccgacaaggagcugggcgcccugcugaagggcguggccaacaacgcccacgcccugcagaccggcgacuucc |
| | AA | ggacccccgccgagcuggcccugaacaaguucgagaaggaguccggccacauccggaaccaggggcgcgacuacucccacaccuucucccg |
| | ORF) | gaaggaccugcaggccgagcugauccugcuguucgagaagcagaaggaguucggcaacccccacguguccgcgggccugaaggagggcauc |
| | | gagacccugcugaugacccagcggcccgcccuguccggcgacgccgugcagaagaugcugggccacugcaccuucgagcccgccgagccca |
| | | aggccgccaagaacaccuacaccgccgagcgguucaucuggcugaccaagcugaacaaccugcggauccuggagcagggcuccgagcggcc |
| | | ccugaccgacaccgagcgggccacccugauggacgagcccuaccggaaguccaagcugaccuacgcccaggcccggaagcugcugggccug |
| | | gaggacaccgccuucuucaagggccugcgguacggcaaggacaacgccgaggccuccacccugauggagaugaaggccuaccacgccaucu |
| | | cccgggcccuggagaaggagggccugaaggacaagaaguccccccugaaccuguccuccgagcugcaggacgagaucggcaccgccuucuc |
| | | ccuguucaagaccgacgaggacaucaccggccggcugaaggaccgggugcagcccgagauccuggaggcccugcugaagcacaucuccuuc |
| | | gacaaguucgugcagaucucccugaaggcccugcggcggaucgugccccugauggagcagggcaagcgguacgacgaggccugcgccgaga |
| | | ucuacggcgaccacuacggcaagaagaacaccgaggagaagaucuaccugccccccauccccgccgacgagauccggaaccccguggugcu |
| | | gcgggcccugucccaggcccggaaggugaucaacggcguggugcggcgguacggcucccccgcccggauccacaucgagaccgcccgggag |
| | | gugggcaaguccuucaaggaccggaaggagaucgagaagcggcaggaggagaaccggaaggaccgggagaaggccgccgccaaguuccggg |
| | | aguacuuccccaacuucgugggcgagcccaaguccaaggacauccugaagcugcggcuguacgagcagcagcacggcaagugccuguacuc |
| | | cggcaaggagaucaaccuggugcggcugaacgagaagggcuacguggagaucgaccacgcccugcccuucucccggaccugggacgacucc |
| | | uucaacaacaaggugcuggugcugggcuccgagaaccagaacaagggcaaccagacccccuacgaguacuucaacggcaaggacaacuccc |
| | | gggaguggcaggaguucaaggcccggguggagaccucccgguucccccgguccaagaagcagcggauccugcugcagaaguucgacgagga |
| | | cggcuucaaggagugcaaccugaacgacacccgguacgugaaccgguuccugugccaguucguggccgaccacauccugcugaccggcaag |
| | | ggcaagcggcggguguucgccuccaacggccagaucaccaaccugcugcggggcuucuggggccugcggaagguggcggccgagaacgacc |
| | | ggcaccacgcccuggacgccguggugguggccugcuccaccguggccaugcagcagaagaucacccgguucgugcgguacaaggagaugaa |
| | | cgccuucgacggcaagaccaucgacaaggagaccggcaaggugcugcaccagaagacccacuucccccagcccugcggaguuuucgcccag |
| | | gaggugaugauccggguguucggcaagcccgacggcaagcccgaguucgaggaggccgacacccccgagaagcugcggacccugcuggccg |
| | | agaagcuguccucccggcccgaggccgugcacgaguacgugaccccccuguucgugucccgggcccccaaccggaagauguccggcgccca |
| | | caaggacacccugcgguccgccaagcgguucgugaagcacaacgagaagaucuccgugaagcggguguggcugaccgagaucaagcuggcc |
| | | gaccuggagaacauggugaacuacaagaacggccgggagaucgagcuguacgaggcccugaaggcccggcuggaggccuacggcggcaacg |
| | | ccaagcaggccuucgaccccaaggacaaccccuucuacaagaagggcggccagcuggugaaggccgugcggguggagaagacccaggaguc |
| | | cggcgugcugcugaacaagaagaacgccuacaccaucgccgacaacggcgacauggugcggguggacguguucugcaagguggacaagaag |
| | | ggcaagaaccaguacuucaucgugcccaucuacgccuggcagguggccgagaacauccugcccgacaucgacugcaagggcuaccggaucg |
| | | acgacuccuacaccuucugcuucucccugcacaaguacgaccugaucgccuuccagaaggacgagaaguccaagguggaguucgccuacua |
| | | caucaacugcgacuccuccaacggccgguucuaccuggccuggcacgacaagggcuccaaggagcagcaguuccggaucuccacccagaac |
| | | cuggugcugauccagaaguaccaggugaacgagcugggcaaggagauccggcccugccggcugaagaagcggccccccgugcgguag |
| 139 | Exemplary | AUGGCAGCAUUCAAGCCGAACUCGAUCAACUACAUCCUGGGACUGGACAUCGGAAUCGCAUCGGUCGGAUGGGCAAUGGUCGAAAUCGACG |
| | open | AAGAAGAAAACCCGAUCAGACUGAUCGACCUGGGAGUCAGAGUCUUCGAAAGAGCAGAAGUCCCGAAGACAGGAGACUCGCUGGCAAUGGC |
| | reading | AAGAAGACUGGCAAGAUCGGUCAGAAGACUGACAAGAAGAAGAGCACACAGACUGCUGAGAACAAGAAGACUGCUGAAGAGAGAAGGAGUC |
| | frame | CUGCAGGCAGCAAACUUCGACGAAAACGGACUGAUCAAGUCGCUGCCGAACACACCGUGGCAGCUGAGAGCAGCAGCACUGGACAGAAAGC |
| | for | UGACACCGCUGGAAUGGUCGGCAGUCCUGCUGCACCUGAUCAAGCACAGAGGAUACCUGUCGCAGAGAAAGAACGAAGGAGAAACAGCAGA |
| | Nme1Cas9 | CAAGGAACUGGGAGCACUGCUGAAGGGAGUCGCAGGAAACGCACACGCACUGCAGACAGGAGACUUCAGAACACCGGCAGAACUGGCACUG |
| | (mRNA | AACAAGUUCGAAAAGGAAUCGGGACACAUCAGAAACCAGAGAUCGGACUACUCGCACACAUUCUCGAGAAAGGACCUGCAGGCAGAACUGA |
| | AB | UCCUGCUGUUCGAAAAGCAGAAGGAAUUCGGAAACCCGCACGUCUCGGGAGGACUGAAGGAAGGAAUCGAAACACUGCUGAUGACACAGAG |
| | ORF) | ACCGGCACUGUCGGGAGACGCAGUCCAGAAGAUGCUGGGACACUGCACAUUCGAACCGGCAGAACCGAAGGCAGCAAAGAACACAUACACA |
| | | GCAGAAAGAUUCAUCUGGCUGACAAAGCUGAACAACCUGAGAAUCCUGGAACAGGGAUCGGAAAGACCGCUGACAGACACAGAAAGAGCAA |
| | | CACUGAUGGACGAACCGUACAGAAAGUCGAAGCUGACAUACGCACAGGCAAGAAAGCUGCUGGGACUGGAAGACACAGCAUUCUUCAAGGG |
| | | ACUGAGAUACGGAAAGGACAACGCAGAAGCAUCGACACUGAUGGAAAUGAAGGCAUACCACGCAAUCUCGAGAGCACUGGAAAAGGAAGGA |
| | | CUGAAGGACAAGAAGUCGCCGCUGAACCUGUCGCCGGAACUGCAGGACGAAAUCGGAACAGCAUUCUCGCUGUUCAAGACAGACGAAGACA |
| | | UCACAGGAAGACUGAAGGACAGAAUCCAGCCGGAAAUCCUGGAAGCACUGCUGAAGCACAUCUCGUUCGACAAGUUCGUCCAGAUCUCGCU |
| | | GAAGGCACUGAGAAGAAUCGUCCCGCUGAUGGAACAGGGAAAGAGAUACGACGAAGCAUGCGCAGAAAUCUACGGAGACCACUACGGAAAG |
| | | AAGAACACAGAAGAAAAGAUCUACCUGCCGCCGAUCCCGGCAGACGAAAUCAGAAACCCGGUCGUCCUGAGAGCACUGUCGCAGGCAAGAA |
| | | AGGUCAUCAACGGAGUCGUCAGAAGAUACGGAUCGCCGGCAAGAAUCCACAUCGAAACAGCAAGAGAAGUCGGAAAGUCGUUCAAGGACAG |
| | | AAAGGAAAUCGAAAAGAGACAGGAAGAAAACAGAAAGGACAGAGAAAAGGCAGCAGCAAAGUUCAGAGAAUACUUCCCGAACUUCGUCGGA |
| | | GAACCGAAGUCGAAGGACAUCCUGAAGCUGAGACUGUACGAACAGCAGCACGGAAAGUGCCUGUACUCGGGAAAGGAAAUCAACCUGGGAA |
| | | GACUGAACGAAAAGGGAUACGUCGAAAUCGACCACGCACUGCCGUUCUCGAGAACAUGGGACGACUCGUUCAACAACAAGGUCCUGGUCCU |
| | | GGGAUCGGAAAACCAGAACAAGGGAAACCAGACACCGUACGAAUACUUCAACGGAAAGGACAACUCGAGAGAAUGGCAGGAAUUCAAGGCA |
| | | AGAGUCGAAACAUCGAGAUUCCCGAGAUCGAAGAAGCAGAGAAUCCUGCUGCAGAAGUUCGACGAAGACGGAUUCAAGGAAAGAAACCUGA |
| | | ACGACACAAGAUACGUCAACAGAUUCCUGUGCCAGUUCGUCGCAGACAGAAUGAGACUGACAGGAAAGGGAAAGAAGAGAGUCUUCGCAUC |
| | | GAACGGACAGAUCACAAACCUGCUGAGAGGAUUCUGGGGACUGAGAAAGGUCAGAGCAGAAAACGACAGACACCACGCACUGGACGCAGUC |
| | | GUCGUCGCAUGCUCGACAGUCGCAAUGCAGCAGAAGAUCACAAGAUUCGUCAGAUACAAGGAAAUGAACGCAUUCGACGGAAAGACAAUCG |
| | | ACAAGGAAACAGGAGAAGUCCUGCACCAGAAGACACACUUCCCGCAGCCGUGGGAAUUCUUCGCACAGGAAGUCAUGAUCAGAGUCUUCGG |
| | | AAAGCCGGACGGAAAGCCGGAAUUCGAAGAAGCAGACACACUGGAAAAGCUGAGAACACUGCUGGCAGAAAAGCUGUCGUCGAGACCGGAA |
| | | GCAGUCCACGAAUACGUCACACCGCUGUUCGUCUCGAGAGCACCGAACAGAAAGAUGUCGGGACAGGGACACAUGGAAACAGUCAAGUCGG |
| | | CAAAGAGACUGGACGAAGGAGUCUCGGUCCUGAGAGUCCCGCUGACACAGCUGAAGCUGAAGGACCUGGAAAAGAUGGUCAACAGAGAAAG |
| | | AGAACCGAAGCUGUACGAAGCACUGAAGGCAAGACUGGAAGCACACAAGGACGACCCGGCAAAGGCAUUCGCAGAACCGUUCUACAAGUAC |
| | | GACAAGGCAGGAAACAGAACACAGCAGGUCAAGGCAGUCAGAGUCGAACAGGUCCAGAAGACAGGAGUCUGGGUCAGAAACCACAACGGAA |
| | | UCGCAGACAACGCAACAAUGGUCAGAGUAGACGUCUUCGAAAAGGGAGACAAGUACUACCUGGUCCCGAUCUACUCGUGGCAGGUCGCAAA |
| | | GGGAAUCCUGCCGGACAGAGCAGUCGUCCAGGGAAAGGACGAAGAAGACUGGCAGCUGAUCGACGACUCGUUCAACUUCAAGUUCUCGCUG |
| | | CACCCGAACGACCUGGUCGAAGUCAUCACAAAGAAGGCAAGAAUGUUCGGAUACUUCGCAUCGUGCCACAGAGGAACAGGAAACAUCAACA |
| | | UCAGAAUCCACGACCUGGACCACAAGAUCGGAAAGAACGGAAUCCUGGAAGGAAUCGGAGUCAAGACAGCACUGUCGUUCCAGAAGUACCA |
| | | GAUCGACGAACUGGGAAAGGAAAUCAGACCGUGCAGACUGAAGAAGAGACCGCCGGUCAGAUCCGGAAAGAGAACAGCAGACGGAUCGGAA |
| | | UUCGAAUCGCCGAAGAAGAAGAGAAAGGUCGAAUGA |
| 140 | WT Smu | AUGGAAAAAUUUCACUAUGUAUUGGGUUUGGAUUUGGGUAUCGCCUCUGUGGGGUGGGCUGCCAUUGAAAUUGACAAGGAAACCGAAACAU |
| | Cas9 | CAAUCGGUUUAUUGGAUUGCGGUGUCAGAACAUUUGAACGUGCAGAAGUACCCAAAACAGGCGAUUCUCUUGCCAAAGCUCGCCGUGAAGC |
| | coding | CAGAAGUACUCGCCGUUUAAUUCGCAGACGUUCGCAUCGCUUAUUACGUUUAAAACGUUUAUUGAAACGUGAAAUUUUCAGGCAGCCUGAA |
| | sequence | ACGUUUAAAGACUUACCAAUCAAUGCUUGGCAAUUGCGUGUUAAAGGCUUGGAUAGUCGGUUGAAUGAAUAUGAAUGGGCGGCCGUUUUAU |
| | | UGCAUUUGGUGAAGCAUCGCGGUUAUUUAUCGCAACGCAAAAGCGAAAUGAGCGAAACAGACAGCAAAUCUGAAAUGGGCAGAUUACUGGC |
| | | AGGUGUGGCGGAAAAUCACCAACUUUUACAACAAGAACAAUAUCGUACACCAGCCGAAUUAGCACUCAAAAAAUUUGUGAAACAUUUUCGC |
| | | AAUAAAGGUGGCGAUUAUGCACACACUUUCAACCGUUUGGAUUUGCAAGCCGAAUUGCAUUUAUUGUUUCAAAAACAACGUGAAUUAGGCA |
| | | AUCCAUUCACUUCACCAGAAUUGGAACGGCAAGUUGAUGAUUUGUUGAUGACGCAGCGCAGUGCUUUACAAGGUGAUGCGAUUUUGAAAAU |
| | | GUUGGGUCAUUGUGGGUUUGAACCUGAACAAUUCAAAGCAGCGAAAAACACAUUCAGUGCCGAACGUUUUAUUUGGUUGACAAAACUCAAU |
| | | AAUCUUCGCAUUCAAGACCAAGGCAAAGAACGUGCGUUAACUGCCGAUGAGCGUACCAAAUUGUUGGACGAGCCUUAUAAAAAAAGUAAAU |
| | | UGACUUACGCACAAGUUCGCAAAUUAUUAAGCUUGCCUCAAACUGCUAUUUUUAAAGGUUUGCGUUAUGAUUUGGAACAUGACAAAAAAGC |
| | | AGAAAACAGUACGUUGAUGGAAAUGAAAUCCUAUCACAACAUCCGCCAAACAUUGGAAAAAUCAGGUUUGAAAACAGAAUGGCAAAGUAUU |
| | | GCCACGCAGCCUGAAAUUUUAGAUGCAAUUGGCACGGCGUUUUCCAUUUAUAAAACCGAUGAAGAUAUUUCGCAUGAAUUAAAAACGUGCA |
| | | GGCUGCCUGAAAACGUAUUGAAUGAAUUACUGAAAAACAUCAAUUUUGAUGGAUUCAUUCAAUUAUCGUUGACUGCAUUACGCAAAAUUUU |
| | | GCCCUUGAUGGAACAAGGCUACCGUUAUGAUGAAGCGUGUACCCAAAUUUACGGUAAUCAUCAUUCAGGCAGCUUGCAACAAGAAUCAAAG |
| | | CAAUUUUUGCCACAUAUUCCGAUUGAUGAUGUCCGAAAUCCUGUGGUGUUCCGUACUUUGACCCAAGCAAGAAAAGUGGUGAAUGCGAUUA |
| | | UUCGUCGGUAUGGUUCGCCAGCUCGUGUGCAUAUUGAGAUGGCGCGUGAAUUGGGUAAGUCUAAAUCAGACCGUGACCGAAUUGAAAAACA |
| | | ACAACAAAAAAAUAAAAAAGAACGUGAAAACGCAGUCGCCAAAUUCAAAGAAGAUUUCCCUGAUUUUGUGGGCGAACCCAGAGGGAAAGAU |
| | | AUUUUGAAAAUGCGUUUGUAUGAACAACAACACGGCAAAUGUUUGUAUUCGGGUCAUGAUAUUGAUAUUAAUCGAUUGAAUGAAAAAGGUU |
| | | AUGUUGAAAUUGACCAUGCCCUGCCAUUUUCACGGACUUGGGAUGAUAGUCAAAAUAAUAAAGUUUUGGUACUUGGCAGCGAAAACCAAAA |
| | | UAAACGCAAUCAAACGCCUGAUGAAUAUUUGGACGGUGCAAACAAUAGCCAACGUUGGCUUGAAUUUCAAGCGCGUGUACAAACUUGUCAU |
| | | UUUUCUUACGGUAAAAAACAACGCAUUCAAUUAGCCAAAUUAGACGAUGAAACCGAAAAAGGAUUUUUAGAACGCAAUCUAAAUGAUACGC |
| | | GGUAUAUUGCUCGUUUUAUGUGUCAAUUUGUCCAAGAAAAUUUAUAUUUGACAGGUAAAGGAAAACGUCUUGUUUUUGCAUCAAACGGCGG |
| | | AAUGACCGCAACAUUGAGAAAUUUAUGGGGUUUGAGAAAAGUCCGUGAAGACAACGACCGCCAUCAUGCUCUUGAUGCGAUUGUGGUGGCG |
| | | UGUUCCACUGCUUCUAUGCAACAAAAAAUAACCAAAGCAUUUCAACGCCAUGAAAGCAUUGAAUAUGUGGAUACCGAAACGGGCGAAGUAA |
| | | AAUUUCGUAUUCCACAGCCUUGGGAUUUUUUCCGUCAGGAAGUGAUGAUUCGUGUGUUCAGCGACCAACCGUGUGAAGAUUUGGUAGAAAA |
| | | AUUGUCGGCUCGUCCCGAAGCUUUGCAUGACAACGUAACGCCUUUAUUUGUCUCGCGUGCACCAAAUCGCAAAAUGUCGGGGCAAGGGCAU |
| | | UUGGAAACCAUCAAAUCUGCAAAAAGGCUGUCUGAAGAAAACAGUAUGGUUAAAAAACCAUUAACCACAUUGAAAUUAAAAGAUAUUCCAG |
| | | AAAUCGUAGGCUACCCGAGUCGUGAACCUCAAUUGUAUGCCGCAUUGAAAACACGUUUAGAAACGCAUGAUGAUGACCCAAUUAAAGCCUU |
| | | UGCCAAACCCUUUUACAAACCCAAUAAAAAUGGUGAAUUGGGGGCGUUGGUUCGAUCGGUGCGUGUGAAAGGUGUACAAAAUACGGGUGUA |
| | | AUGGUUCAUGAUGGCAAAGGCAUUGCCGAUAAUGCCACAAUGGUUCGUGUUGAUGUCUAUACCAAAGCGGGCAAAAAUUACCUUGUUCCUG |
| | | UGUAUGUUUGGCAGGUGGCUCAAGGAAUUUUGCCAAAUCGGGCGGUUACUUCUGGCAAAAGUGAAGCAGAUUGGGAUUUAAUUGAUGAAAG |
| | | UUUUGAAUUUAAAUUUUCGCUGUCUCGUGGGGAUUUAGUGGAAAUGAUUAGCAAUAAAGGAAGAAUUUUUGGUUAUUACAAUGGGUUAGAU |
| | | CGUGCAAAUGGAAGUAUUGGGAUUCGUGAACAUGAUUUGGAAAAGUCCAAAGGAAAAGAUGGUGUUCAUCGUGUUGGCGUGAAAACCGCCA |
| | | CCGCAUUCAACAAAUACCACGUUGACCCACUUGGUAAAGAAAUUCAUCGGUGUUCAUCUGAACCACGCCCCACAUUAAAAAUCAAAUCCAA |
| | | GAAAUAA |
| 141 | human | ATGGAGAAGTTCCACTACGTGCTGGGACTGGATCTGGGAATCGCAAGCGTGGGATGGGCAGCAATCGAGATCGATAAGGAGACCGAGACAT |
| | codon- | CCATCGGCCTGCTGGACTGCGGCGTGAGGACCTTTGAGAGGGCAGAGGTGCCTAAGACAGGCGACAGCCTGGCAAAGGCAAGGAGAGAGGC |
| | optimized | AAGGTCTACAAGGCGCCTGATCCGGAGAAGGAGCCACAGGCTGCTGCGGCTGAAGAGACTGCTGAAGCGGGAGATCTTTAGACAGCCAGAG |
| | Smu | ACCTTCAAGGATCTGCCCATCAACGCATGGCAGCTGAGGGTGAAGGGACTGGACTCTCGGCTGAATGAGTACGAGTGGGCAGCCGTGCTGC |
| | coding | TGCACCTGGTGAAGCACAGGGGCTATCTGAGCCAGCGCAAGTCCGAGATGTCTGAGACCGACTCTAAGAGCGAGATGGGCAGGCTGCTGGC |
| | sequence | AGGAGTGGCCGAGAACCACCAGCTGCTGCAGCAGGAGCAGTACAGGACCCCAGCAGAGCTGGCCCTGAAGAAGTTTGTGAAGCACTTCCGC |
| | | AACAAGGGCGGCGATTATGCCCACACATTCAATAGGCTGGACCTGCAGGCAGAGCTGCACCTGCTGTTTCAGAAGCAGAGAGAGCTGGGCA |
| | | ACCCCTTCACCTCTCCTGAGCTGGAGCGCCAGGTGGACGATCTGCTGATGACACAGCGGAGCGCCCTGCAGGGCGATGCAATCCTGAAGAT |
| | | GCTGGGCCACTGTGGCTTTGAGCCTGAGCAGTTCAAGGCCGCCAAGAATACCTTTAGCGCCGAGAGATTCATCTGGCTGACAAAGCTGAAC |
| | | AATCTGAGGATCCAGGACCAGGGCAAGGAGAGAGCCCTGACCGCCGATGAGAGGACAAAGCTGCTGGACGAGCCTTACAAGAAGTCTAAGC |
| | | TGACCTATGCCCAGGTGAGGAAGCTGCTGAGCCTGCCTCAGACAGCCATCTTCAAGGGCCTGCGCTACGATCTGGAGCACGACAAGAAGGC |
| | | CGAGAACTCTACCCTGATGGAGATGAAGAGCTATCACAATATCCGGCAGACACTGGAGAAGTCCGGCCTGAAGACCGAGTGGCAGTCTATC |
| | | GCCACACAGCCAGAGATCCTGGACGCAATCGGAACCGCCTTTTCCATCTACAAGACAGATGAGGACATCTCTCACGAGCTGAAGACCTGCA |
| | | GACTGCCTGAGAACGTGCTGAATGAGCTGCTGAAGAACATCAATTTTGATGGCTTCATCCAGCTGAGCCTGACCGCCCTGCGCAAGATCCT |
| | | GCCACTGATGGAGCAGGGCTACCGGTATGACGAGGCCTGTACACAGATCTACGGCAACCACCACTCCGGCTCTCTGCAGCAGGAGTCCAAG |
| | | CAGTTTCTGCCTCACATCCCAATCGACGATGTGCGGAACCCAGTGGTGTTCAGAACCCTGACACAGGCCAGGAAGGTGGTGAATGCCATCA |
| | | TCCGCCGGTATGGATCTCCAGCAAGGGTGCACATCGAGATGGCAAGGGAGCTGGGCAAGAGCAAGTCCGATAGAGACAGGATCGAGAAGCA |
| | | GCAGCAGAAGAACAAGAAGGAGAGGGAGAATGCCGTGGCCAAGTTCAAGGAGGATTTTCCAGACTTCGTGGGAGAGCCTAGGGGCAAGGAT |
| | | ATCCTGAAGATGCGGCTGTACGAGCAGCAGCACGGCAAGTGCCTGTATTCCGGCCACGATATCGACATCAACCGGCTGAATGAGAAGGGCT |
| | | ACGTGGAGATCGACCACGCCCTGCCTTTTAGCAGAACCTGGGACGATTCCCAGAACAATAAGGTGCTGGTGCTGGGCAGCGAGAACCAGAA |
| | | TAAGCGCAATCAGACACCAGATGAGTACCTGGACGGCGCCAACAATTCCCAGAGATGGCTGGAGTTTCAGGCCAGGGTGCAGACCTGCCAC |
| | | TTCTCTTATGGCAAGAAGCAGAGGATCCAGCTGGCCAAGCTGGACGATGAGACCGAGAAGGGCTTCCTGGAGCGCAACCTGAATGATACAA |
| | | GGTACATCGCCCGGTTCATGTGCCAGTTCGTGCAGGAGAACCTGTATCTGACCGGCAAGGGCAAGCGCCTGGTGTTTGCCTCCAACGGCGG |
| | | CATGACCGCCACACTGCGGAATCTGTGGGGCCTGAGGAAGGTGCGCGAGGATAATGACAGACACCACGCACTGGACGCAATCGTGGTGGCA |
| | | TGCAGCACCGCATCCATGCAGCAGAAGATCACAAAGGCCTTTCAGCGGCACGAGAGCATCGAGTATGTGGATACCGAGACAGGCGAGGTGA |
| | | AGTTCAGAATCCCCCAGCCTTGGGACTTCTTTCGCCAGGAAGTGATGATCCGGGTGTTTTCCGATCAGCCATGTGAGGACCTGGTGGAGAA |
| | | GCTGTCTGCCAGGCCAGAGGCCCTGCACGATAACGTGACCCCTCTGTTCGTGAGCAGGGCACCAAATAGAAAGATGTCCGGCCAGGGCCAC |
| | | CTGGAGACAATCAAGTCCGCCAAGCGCCTGTCCGAGGAGAACTCTATGGTGAAGAAGCCCCTGACCACACTGAAGCTGAAGGACATCCCTG |
| | | AGATCGTGGGCTACCCATCTAGAGAGCCCCAGCTGTATGCCGCCCTGAAGACCAGGCTGGAGACACACGACGATGACCCAATCAAGGCCTT |
| | | TGCCAAGCCTTTCTACAAGCCAAACAAGAATGGAGAGCTGGGCGCCCTGGTGCGGTCCGTGAGAGTGAAGGGCGTGCAGAACACAGGCGTG |
| | | ATGGTGCACGATGGCAAGGGCATCGCCGACAATGCCACAATGGTGCGGGTGGACGTGTATACAAAGGCCGGCAAGAACTACCTGGTGCCCG |
| | | TGTACGTGTGGCAGGTGGCACAGGGAATCCTGCCAAATAGAGCCGTGACCTCTGGCAAGAGCGAGGCCGATTGGGACCTGATCGATGAGAG |
| | | CTTCGAGTTTAAGTTCTCTCTGAGCAGAGGCGACCTGGTGGAGATGATCTCCAACAAGGGCAGGATCTTCGGCTACTATAACGGCCTGGAT |
| | | AGAGCCAATGGCAGCATCGGCATCAGGGAGCACGATCTGGAGAAGTCCAAGGGCAAGGACGGAGTGCACAGGGTGGGAGTGAAGACCGCAA |
| | | CAGCCTTTAATAAGTACCACGTGGACCCCCTGGGCAAGGAGATCCACAGATGTAGCTCCGAGCCAAGGCCCACCCTGAAGATCAAGAGCAA |
| | | GAAG |
| 142 | WT Smu | MEKFHYVLGLDLGIASVGWAAIEIDKETETSIGLLDCGVRTFERAEVPKTGDSLAKARREARSTRRLIRRRSHRLLRLKRLLKREIFRQPE |
| | Cas9 | TFKDLPINAWQLRVKGLDSRLNEYEWAAVLLHLVKHRGYLSQRKSEMSETDSKSEMGRLLAGVAENHQLLQQEQYRTPAELALKKFVKHFR |
| | amino | NKGGDYAHTFNRLDLQAELHLLFQKQRELGNPFTSPELERQVDDLLMTQRSALQGDAILKMLGHCGFEPEQFKAAKNTFSAERFIWLTKLN |
| | acid | NLRIQDQGKERALTADERTKLLDEPYKKSKLTYAQVRKLLSLPQTAIFKGLRYDLEHDKKAENSTLMEMKSYHNIRQTLEKSGLKTEWQSI |
| | sequen | ATQPEILDAIGTAFSIYKTDEDISHELKTCRLPENVLNELLKNINFDGFIQLSLTALRKILPLMEQGYRYDEACTQIYGNHHSGSLQQESK |
| | ce | QFLPHIPIDDVRNPVVFRTLTQARKVVNAIIRRYGSPARVHIEMARELGKSKSDRDRIEKQQQKNKKERENAVAKFKEDFPDFVGEPRGKD |
| | | ILKMRLYEQQHGKCLYSGHDIDINRLNEKGYVEIDHALPFSRTWDDSQNNKVLVLGSENQNKRNQTPDEYLDGANNSQRWLEFQARVQTCH |
| | | FSYGKKQRIQLAKLDDETEKGFLERNLNDTRYIARFMCQFVQENLYLTGKGKRLVFASNGGMTATLRNLWGLRKVREDNDRHHALDAIVVA |
| | | CSTASMQQKITKAFQRHESIEYVDTETGEVKFRIPQPWDFFRQEVMIRVFSDQPCEDLVEKLSARPEALHDNVTPLFVSRAPNRKMSGQGH |
| | | LETIKSAKRLSEENSMVKKPLTTLKLKDIPEIVGYPSREPQLYAALKTRLETHDDDPIKAFAKPFYKPNKNGELGALVRSVRVKGVQNTGV |
| | | MVHDGKGIADNATMVRVDVYTKAGKNYLVPVYVWQVAQGILPNRAVTSGKSEADWDLIDESFEFKFSLSRGDLVEMISNKGRIFGYYNGLD |
| | | RANGSIGIREHDLEKSKGKDGVHRVGVKTATAFNKYHVDPLGKEIHRCSSEPRPTLKIKSKK |
| 143 | WT Cje | ATGGCAAGAATTTTGGCATTTGATATAGGAATAAGCTCTATTGGCTGGGCATTTAGTGAAAATGATGAGT |
| | Cas9 | TAAAAGATTGTGGAGTTAGGATTTTTACAAAGGTTGAAAATCCCAAAACAGGAGAATCCTTAGCCTTGCC |
| | coding | AAGACGCCTTGCAAGAAGTGCTAGAAAACGCCTTGCTAGACGCAAAGCAAGGCTAAATCACTTAAAACAT |
| | sequence | TTAATCGCAAATGAATTTAAGTTAAATTACGAAGATTATCAAAGCTTTGATGAAAGTTTAGCCAAGGCTT |
| | | ATAAAGGATCTTTAATTAGCCCTTATGAGTTAAGATTTAGAGCTTTAAACGAGCTTTTAAGTAAGCAAGA |
| | | TTTTGCAAGAGTGATTTTACATATTGCAAAAAGGCGTGGCTATGATGATATTAAAAATAGTGATGATAAA |
| | | GAAAAAGGTGCGATTTTAAAAGCTATCAAGCAAAATGAAGAAAAACTAGCAAATTATCAAAGTGTGGGCG |
| | | AGTATCTTTATAAAGAGTATTTTCAAAAATTCAAAGAAAATTCCAAAGAATTTACAAATGTTAGAAATAA |
| | | AAAAGAAAGTTATGAACGCTGCATAGCGCAAAGTTTTTTAAAAGATGAATTAAAGCTTATTTTTAAAAAA |
| | | CAAAGAGAATTTGGCTTTTCTTTTTCAAAAAAATTTGAAGAAGAGGTGCTTAGTGTAGCATTTTATAAAA |
| | | GGGCTTTAAAAGATTTTTCTCATTTGGTGGGAAATTGTAGTTTTTTTACCGATGAAAAAAGAGCGCCAAA |
| | | AAATTCGCCCTTAGCTTTTATGTTTGTAGCACTTACAAGAATTATCAATCTTTTAAACAATCTTAAAAAT |
| | | ACTGAAGGAATTTTATATACAAAAGATGATTTAAACGCCCTTTTAAATGAAGTTTTAAAAAACGGCACTC |
| | | TAACTTATAAACAAACAAAAAAGCTTTTGGGCTTAAGCGATGATTATGAATTTAAAGGAGAAAAAGGAAC |
| | | TTATTTTATTGAGTTTAAAAAATACAAAGAATTTATAAAAGCCCTAGGTGAGCATAATTTAAGCCAAGAT |
| | | GATTTAAATGAAATAGCAAAAGATATTACTCTTATAAAAGATGAGATTAAACTTAAAAAGGCTTTAGCAA |
| | | AATATGATTTAAATCAAAATCAAATTGATAGTTTAAGCAAATTGGAATTTAAAGACCATTTAAATATAAG |
| | | TTTTAAAGCCTTAAAACTTGTCACTCCTTTAATGCTTGAAGGTAAAAAATACGATGAAGCTTGCAATGAG |
| | | CTTAATTTAAAAGTAGCAATCAATGAAGATAAAAAAGACTTTTTACCCGCATTTAATGAAACTTATTACA |
| | | AAGATGAAGTAACTAATCCTGTGGTTTTAAGGGCGATTAAAGAATATAGAAAGGTCTTAAATGCCTTACT |
| | | TAAAAAATACGGTAAAGTGCATAAAATAAACATTGAATTAGCAAGAGAAGTAGGTAAAAATCACAGCCAA |
| | | AGAGCTAAAATAGAAAAAGAGCAAAACGAAAACTACAAGGCCAAAAAAGACGCCGAACTTGAATGTGAAA |
| | | AACTAGGCTTAAAAATAAATAGCAAAAATATTTTAAAATTAAGATTATTTAAAGAACAAAAAGAATTTTG |
| | | TGCTTATAGTGGAGAAAAGATTAAAATTAGTGATTTGCAAGATGAAAAAATGCTTGAAATTGATCACATT |
| | | TACCCTTATTCTAGAAGTTTTGATGATTCTTATATGAATAAAGTTTTAGTTTTTACCAAGCAAAATCAAG |
| | | AAAAACTTAATCAAACCCCCTTTGAAGCCTTTGGCAATGATAGTGCAAAATGGCAGAAAATTGAAGTTTT |
| | | AGCAAAAAATTTGCCTACTAAAAAGCAAAAAAGAATTTTAGATAAAAATTACAAAGACAAAGAGCAAAAA |
| | | AACTTTAAAGATAGAAATCTAAACGATACTCGCTACATAGCAAGGCTTGTTTTAAACTACACTAAAGATT |
| | | ATTTAGATTTTTTACCTTTAAGCGATGATGAAAATACAAAATTAAACGATACACAAAAAGGCTCAAAAGT |
| | | GCATGTAGAAGCAAAAAGCGGTATGCTTACATCGGCTTTAAGACACACTTGGGGCTTTAGCGCTAAGGAT |
| | | AGAAATAACCATCTTCATCACGCCATCGATGCAGTAATTATTGCTTATGCAAACAACTCTATCGTAAAGG |
| | | CTTTTTCAGATTTTAAAAAAGAGCAAGAAAGCAACAGTGCAGAACTTTATGCAAAAAAAATTAGTGAATT |
| | | AGATTATAAAAACAAAAGGAAGTTTTTTGAGCCTTTTAGTGGTTTTAGGCAAAAGGTTTTAGATAAAATT |
| | | GATGAAATTTTTGTCTCAAAACCTGAGAGAAAAAAGCCAAGTGGAGCTTTACATGAAGAAACATTTAGAA |
| | | AAGAAGAAGAATTCTATCAATCATACGGCGGAAAAGAAGGAGTTTTAAAAGCCCTAGAGCTTGGTAAAAT |
| | | CCGCAAAGTAAATGGTAAAATAGTTAAAAATGGCGATATGTTTAGAGTGGATATTTTTAAACACAAAAAG |
| | | ACAAATAAATTTTATGCTGTGCCAATTTATACTATGGATTTTGCTTTAAAAGTATTACCAAATAAAGCTG |
| | | TAGCACGAAGTAAAAAAGGTGAGATAAAAGACTGGATTTTAATGGATGAAAATTATGAGTTTTGCTTTTC |
| | | TTTATATAAAGATAGTTTGATTTTAATTCAAACTAAAGATATGCAAGAGCCAGAATTTGTTTATTATAAT |
| | | GCTTTTACAAGCTCTACTGTTAGTTTGATTGTTTCAAAACACGATAATAAATTTGAAACGCTAAGCAAAA |
| | | ATCAAAAAATATTGTTTAAAAATGCAAATGAAAAAGAAGTAATCGCAAAAAGCATAGGAATTCAAAATCT |
| | | AAAAGTATTTGAAAAATACATAGTTTCAGCACTTGGGGAAGTTACAAAGGCTGAGTTTAGACAAAGAGAA |
| | | GATTTTAAAAAATGA |
| 144 | WT Cje | MARILAFDIGISSIGWAFSENDELKDCGVRIFTKVENPKTGESLALPRRLARSAR |
| | Cas9 | KRLARRKARLNHLKHLIANEFKLNYEDYQSFDESLAKAYKGSLISPYELRFRAL |
| | amino | NELLSKQDFARVILHIAKRRGYDDIKNSDDKEKGAILKAIKQNEEKLANYQSVG |
| | acid | EYLYKEYFQKFKENSKEFTNVRNKKESYERCIAQSFLKDELKLIFKKQREFGFSF |
| | sequence | SKKFEEEVLSVAFYKRALKDFSHLVGNCSFFTDEKRAPKNSPLAFMFVALTRIIN |
| | | LLNNLKNTEGILYTKDDLNALLNEVLKNGTLTYKQTKKLLGLSDDYEFKGEKG |
| | | TYFIEFKKYKEFIKALGEHNLSQDDLNEIAKDITLIKDEIKLKKALAKYDLNQNQ |
| | | IDSLSKLEFKDHLNISFKALKLVTPLMLEGKKYDEACNELNLKVAINEDKKDFL |
| | | PAFNETYYKDEVTNPVVLRAIKEYRKVLNALLKKYGKVHKINIELAREVGKNH |
| | | SQRAKIEKEQNENYKAKKDAELECEKLGLKINSKNILKLRLFKEQKEFCAYSGE |
| | | KIKISDLQDEKMLEIDHIYPYSRSFDDSYMNKVLVFTKQNQEKLNQTPFEAFGN |
| | | DSAKWQKIEVLAKNLPTKKQKRILDKNYKDKEQKNFKDRNLNDTRYIARLVL |
| | | NYTKDYLDFLPLSDDENTKLNDTQKGSKVHVEAKSGMLTSALRHTWGFSAKD |
| | | RNNHLHHAIDAVIIAYANNSIVKAFSDFKKEQESNSAELYAKKISELDYKNKRK |
| | | FFEPFSGFRQKVLDKIDEIFVSKPERKKPSGALHEETFRKEEEFYQSYGGKEGVL |
| | | KALELGKIRKVNGKIVKNGDMFRVDIFKHKKTNKFYAVPIYTMDFALKVLPNK |
| | | AVARSKKGEIKDWILMDENYEFCFSLYKDSLILIQTKDMQEPEFVYYNAFTSST |
| | | VSLIVSKHDNKFETLSKNQKILFKNANEKEVIAKSIGIQNLKVFEKYIVSALGEVT |
| | | KAEFRQREDFKK |
| 145- | | NQT USED |
| 149 | | |
| 150 | Exemplary | GAPESATESGGTSTESEGSAGTSTESEGSAGSAGSTSTEEGTSTESEGSAGTSTESEGSAGTSESATESGGTSTESEGSSS |
| | protein | |
| | linker | |
| | (81 aa) | |
| 151 | Exemplary | GAPESATESGGTSTESEGSAGTSTESEGSAGSAGSTSTEEGTSTESEGSAGTSTESEGSAGTSESATGSSS |
| | protein | |
| | linker | |
| | (71 aa) | |
| 152 | Exemplary | GAPESATESGGTSTESEGSAGTSTESEGSAGSAGSTSTEEGTSTESEGSAGTSTESEGSSS |
| | protein | |
| | linker | |
| | (61 aa) | |
| 153 | Exemplary | GAPESATESGGTSTESEGSAGTSTESEGSAGSAGSTSTEEGTSTESEGSSS |
| | protein | |
| | linker | |
| | (51 aa) | |
| 154 | Exemplary | GAPESATESGGTSTESEGSAGTSTESEGSAGSAGSTSGSSS |
| | protein | |
| | linker | |
| | (41 aa) | |
| 155 | Exemplary | GAPESATESGGTSTESEGSAGTSTESEGSSS |
| | protein | |
| | linker | |
| | (31 aa) | |
| 156 | Exemplary | GAPESATESGGTSTESEGSSS |
| | protein | |
| | linker | |
| | (21 aa) | |
| 157 | Exemplary | GAPESATGSSS |
| | protein | |
| | linker | |
| | (11 aa) | |
| 158 | Exemplary | GAPESATESGGTSTESEGSAGTSTESEGSAGSAGSTSGGSGGGSGGSGSAGTSTESEGSAGTSESATESGGTSTESEGSSS |
| | protein | |
| | linker | |
| | (81 aa) | |

TABLE 38
Additional Sequences

| SEQ | | |
|---|---|---|
| ID | | |
| NO | Description | Sequence |
| 200 | Exemplary Spy | mC*mC*mA*GUCCAGCGAGGCAAAGGGUUUUAGAmGmCmUmAmGmAmAmAmUmAmGmCAAGUUAAAAUAAGGCUAGUCCG |
| | guide; G000267 | UUAUCAmAmCmUmUmGmAmAmAmAmAmGmUmGmGmCmAmCmCmGmAmGmUmCmGmGmUmGmCmU*mU*mU*mU |
| 201 | Exemplary Spy | mA*mC*mA*CAAAUACCAGUCCAGCGGUUUUAGAmGmCmUmAmGmAmAmAmUmAmGmCAAGUUAAAAUAAGGCUAGUCCG |
| | guide; G000502 | UUAUCAmAmCmUmUmGmAmAmAmAmAmGmUmGmGmCmAmCmCmGmAmGmUmCmGmGmUmGmCmU*mU*mU*mU |
| 202 | Exemplary Spy | mC*mC*mC*AGAGGCAAAGGGCUCCCGUUUUAGAmGmCmUmAmGmAmAmAmUmAmGmCAAGUUAAAAUAAGGCUAGUCCG |
| | guide; G000603 | UUAUCAmAmCmUmUmGmAmAmAmAmAmGmUmGmGmCmAmCmCmGmAmGmUmCmGmGmUmGmCmU*mU*mU*mU |
| 203 | Exemplary Spy | mA*mG*mU*GUUCAAAAAGACCUCUGGUUUUAGAmGmCmUmAmGmAmAmAmUmAmGmCAAGUUAAAAUAAGGCUAGUCCG |
| | guide; G000606 | UUAUCAmAmCmUmUmGmAmAmAmAmAmGmUmGmGmCmAmCmCmGmAmGmUmCmGmGmUmGmCmU*mU*mU*mU |
| 204 | Exemplary Spy | mC*mU*mC*CCUGAUGGAGAUGACAGGUUUUAGAmGmCmUmAmGmAmAmAmUmAmGmCAAGUUAAAAUAAGGCUAGUCCG |
| | guide; G000665 | UUAUCAmAmCmUmUmGmAmAmAmAmAmGmUmGmGmCmAmCmCmGmAmGmUmCmGmGmUmGmCmU*mU*mU*mU |
| 205 | Exemplary Spy | mC*mU*mU*UCUACAAGCUUACCCAGGUUUUAGAmGmCmUmAmGmAmAmAmUmAmGmCAAGUUAAAAUAAGGCUAGUCCG |
| | guide; G009577 | UUAUCAmAmCmUmUmGmAmAmAmAmAmGmUmGmGmCmAmCmCmGmAmGmUmCmGmGmUmGmCmU*mU*mU*mU |
| 206 | Exemplary Spy | CAGdTGCGGdTdTCCACACAdTACGdTdTdTdTAGAGCdTAGAAAdTAGCAAGdTdTAAAAdTAAGGCdTAGdTCCGdTd |
| | guide; G012684 | TAdTCAACdTdTGAAAAAGdTGGCACCGAGdTCGGdTGCdTdTdTdTdTdTdTGGdTACCGGdTACC |
| 207 | Exemplary Spy | AAGCCdTGCAdTGAGCdTCAGdTGGdTdTdTdTAGAGCdTAGAAAdTAGCAAGdTdTAAAAdTAAGGCdTAGdTCCGdTd |
| | guide; G012685 | TAdTCAACdTdTGAAAAAGdTGGCACCGAGdTCGGdTGCdTdTdTdTdTdTdTGGdTACCGGdTACC |
| 208 | Exemplary Spy | AdTGGGdTCACAGACGGGdTCCAGdTdTdTdTAGAGCdTAGAAAdTAGCAAGdTdTAAAAdTAAGGCdTAGdTCCGdTdT |
| | guide; G012686 | AdTCAACdTdTGAAAAAGdTGGCACCGAGdTCGGdTGCdTdTdTdTdTdTdTGGdTACCGGdTACC |
| 209 | Exemplary Spy | CdTCAAAGAGACCCAdTGAGAdTGdTdTdTdTAGAGCdTAGAAAdTAGCAAGdTdTAAAAdTAAGGCdTAGdTCCGdTdT |
| | guide; G012687 | AdTCAACdTdTGAAAAAGdTGGCACCGAGdTCGGdTGCdTdTdTdTdTdTdTGGdTACCGGdTACC |
| 210 | Exemplary Spy | AdTCdTCGdTAdTdTdTCAdTGdTCdTCCGdTdTdTdTAGAGCdTAGAAAdTAGCAAGdTdTAAAAdTAAGGCdTAGdTC |
| | guide; G012688 | CGdTdTAdTCAACdTdTGAAAAAGdTGGCACCGAGdTCGGdTGCdTdTdTdTdTdTdTGGdTACCGGdTACC |
| 211 | Exemplary Spy | CACCdTdTGGCdTGdTAGdTCAdTCdTGdTdTdTdTAGAGCdTAGAAAdTAGCAAGdTdTAAAAdTAAGGCdTAGdTCCG |
| | guide; G012746 | dTdTAdTCAACdTdTGAAAAAGdTGGCACCGAGdTCGGdTGCdTdTdTdTdTdTdTGGdTACCGGdTACC |
| 212 | Exemplary Spy | mA*mU*mA*CCAGUCCAGCGAGGCAAGUUUUAGAmGmCmUmAmGmAmAmAmUmAmGmCAAGUUAAAAUAAGGCUAGUCCG |
| | guide; G014304 | UUAUCAmAmCmUmUmGmAmAmAmAmAmGmUmGmGmCmAmCmCmGmAmGmUmCmGmGmUmGmCmU*mU*mU*mU |
| 213 | Exemplary Spy | mC*mC*mU*CCUUUGCCUCGCUGGACGUUUUAGAmGmCmUmAmGmAmAmAmUmAmGmCAAGUUAAAAUAAGGCUAGUCCG |
| | guide; G014317 | UUAUCAmAmCmUmUmGmAmAmAmAmAmGmUmGmGmCmAmCmCmGmAmGmUmCmGmGmUmGmCmU*mU*mU*mU |
| 214 | Exemplary Spy | mC*mU*mG*GUAUUUGUGUCUGAAGCGUUUUAGAmGmCmUmAmGmAmAmAmUmAmGmCAAGUUAAAAUAAGGCUAGUCCG |
| | guide; G014322 | UUAUCAmAmCmUmUmGmAmAmAmAmAmGmUmGmGmCmAmCmCmGmAmGmUmCmGmGmUmGmCmU*mU*mU*mU |
| 215 | Exemplary Spy | mG*mC*mA*AAGGAGGAAGAGUCGAAGUUUUAGAmGmCmUmAmGmAmAmAmUmAmGmCAAGUUAAAAUAAGGCUAGUCCG |
| | guide; G014323 | UUAUCAmAmCmUmUmGmAmAmAmAmAmGmUmGmGmCmAmCmCmGmAmGmUmCmGmGmUmGmCmU*U*mU*mU |
| 216 | Exemplary Spy | mC*mU*mC*UUCCUCCUUUGCCUCGCGUUUUAGAmGmCmUmAmGmAmAmAmUmAmGmCAAGUUAAAAUAAGGCUAGUCCG |
| | guide; G014325 | UUAUCAmAmCmUmUmGmAmAmAmAmAmGmUmGmGmCmAmCmCmGmAmGmUmCmGmGmUmGmCmU*mU*mU*mU |
| 217 | Exemplary Spy | mG*mG*mC*AAAGGAGGAAGAGUCGAGUUUUAGAmGmCmUmAmGmAmAmAmUmAmGmCAAGUUAAAAUAAGGCUAGUCCG |
| | guide; G014326 | UUAUCAmAmCmUmUmGmAmAmAmAmAmGmUmGmGmCmAmCmCmGmAmGmUmCmGmGmUmGmCmU*mU*mU*mU |
| 218 | Exemplary Spy | mU*mU*mU*GACCAUCAGAGGACAUUGUUUUAGAmGmCmUmAmGmAmAmAmUmAmGmCAAGUUAAAAUAAGGCUAGUCCG |
| | guide; G016128 | UUAUCAmAmCmUmUmGmAmAmAmAmAmGmUmGmGmCmAmCmCmGmAmGmUmCmGmGmUmGmCmU*mU*mU*mU |
| 219 | Exemplary Spy | mG*mG*mG*CUCCCAGGAUCCCUCAGGUUUUAGAmGmCmUmAmGmAmAmAmUmAmGmCAAGUUAAAAUAAGGCUAGUCCG |
| | guide; G016133 | UUAUCAmAmCmUmUmGmAmAmAmAmAmGmUmGmGmCmAmCmCmGmAmGmUmCmGmGmUmGmCmU*mU*mU*mU |
| 220 | Exemplary Spy | mA*mA*mA*GACCUCUGAGGGAUCCUGUUUUAGAmGmCmUmAmGmAmAmAmUmAmGmCAAGUUAAAAUAAGGCUAGUCCG |
| | guide; G016138 | UUAUCAmAmCmUmUmGmAmAmAmAmAmGmUmGmGmCmAmCmCmGmAmGmUmCmGmGmUmGmCmU*mU*mU*mU |
| 221 | Exemplary Spy | mU*mC*mC*UGGGAGCCCUUUGCCUCGUUUUAGAmGmCmUmAmGmAmAmAmUmAmGmCAAGUUAAAAUAAGGCUAGUCCG |
| | guide; G016139 | UUAUCAmAmCmUmUmGmAmAmAmAmAmGmUmGmGmCmAmCmCmGmAmGmUmCmGmGmUmGmCmU*mU*mU*mU |
| 222 | Exemplary Spy | mA*mA*mA*AGACCUCUGAGGGAUCCGUUUUAGAmGmCmUmAmGmAmAmAmUmAmGmCAAGUUAAAAUAAGGCUAGUCCG |
| | guide; G016145 | UUAUCAmAmCmUmUmGmAmAmAmAmAmGmUmGmGmCmAmCmCmGmAmGmUmCmGmGmUmGmCmU*mU*mU*mU |
| 223 | Exemplary Spy | mG*mU*mG*UUCAAAAAGACCUCUGAGUUUUAGAmGmCmUmAmGmAmAmAmUmAmGmCAAGUUAAAAUAAGGCUAGUCCG |
| | guide; G016146 | UUAUCAmAmCmUmUmGmAmAmAmAmAmGmUmGmGmCmAmCmCmGmAmGmUmCmGmGmUmGmCmU*mU*mU*mU |
| 224 | Exemplary Spy | mA*mG*mA*AUCCAAAUGUCCUCUGAGUUUUAGAmGmCmUmAmGmAmAmAmUmAmGmCAAGUUAAAAUAAGGCUAGUCCG |
| | guide; G016148 | UUAUCAmAmCmUmUmGmAmAmAmAmAmGmUmGmGmCmAmCmCmGmAmGmUmCmGmGmUmGmCmU*mU*mU*mU |
| 225 | Exemplary Spy | mA*mC*mA*AGCUUACCCAGAGGCAAGUUUUAGAmGmCmUmAmGmAmAmAmUmAmGmCAAGUUAAAAUAAGGCUAGUCCG |
| | guide; G016157 | UUAUCAmAmCmUmUmGmAmAmAmAmAmGmUmGmGmCmAmCmCmGmAmGmUmCmGmGmUmGmCmU*mU*mU*mU |
| 226 | Exemplary Spy | mC*mA*mA*GCUUACCCAGAGGCAAAGUUUUAGAmGmCmUmAmGmAmAmAmUmAmGmCAAGUUAAAAUAAGGCUAGUCCG |
| | guide; G016163 | UUAUCAmAmCmUmUmGmAmAmAmAmAmGmUmGmGmCmAmCmCmGmAmGmUmCmGmGmUmGmCmU*mU*mU*mU |
| 227 | Exemplary Spy | mC*mU*mC*CUCUGUGCCCAGGGUGCGUUUUAGAmGmCmUmAmGmAmAmAmUmAmGmCAAGUUAAAAUAAGGCUAGUCCG |
| | guide; G016164 | UUAUCAmAmCmUmUmGmAmAmAmAmAmGmUmGmGmCmAmCmCmGmAmGmUmCmGmGmUmGmCmU*mU*mU*mU |
| 228 | Exemplary Spy | mC*mU*mA*CUGUGCCCCACCGGCGCGUUUUAGAGCUAGAAAUAGCAAGUUAAAAUAAGGCUAGUCCGUUAUCAAAAUGG |
| | guide; G017875 | CACCGAGUCGGU*mG*mC*mU |
| 229 | Exemplary Spy | mG*mC*mU*GGUGCCCAGGACGAGGAGUUUUAGAGCUAGAAAUAGCAAGUUAAAAUAAGGCUAGUCCGUUAUCAAAAUGG |
| | guide; G017876 | CACCGAGUCGGU*mG*mC*mU |
| 230 | Exemplary Spy | mC*mA*mC*CUUCCGCCGUUGCUCCAGUUUUAGAGCUAGAAAUAGCAAGUUAAAAUAAGGCUAGUCCGUUAUCAAAAUGG |
| | guide; G017877 | CACCGAGUCGGU*mG*mC*mU |
| 231 | Exemplary Spy | mC*mC*mG*CCGUUGCUCCAAGGUAUGUUUUAGAGCUAGAAAUAGCAAGUUAAAAUAAGGCUAGUCCGUUAUCAAAAUGG |
| | guide; G017879 | CACCGAGUCGGU*mG*mC*mU |
| 232 | Exemplary Spy | mA*mA*mG*GUAUGGGUGCCAGGCAAGUUUUAGAGCUAGAAAUAGCAAGUUAAAAUAAGGCUAGUCCGUUAUCAAAAUGG |
| | guide; G017881 | CACCGAGUCGGU*mG*mC*mU |
| 233 | Exemplary Spy | mG*mU*mU*GCCUGGCACCCAUACCUGUUUUAGAGCUAGAAAUAGCAAGUUAAAAUAAGGCUAGUCCGUUAUCAAAAUGG |
| | guide; G017892 | CACCGAGUCGGU*mG*mC*mU |
| 234 | Exemplary Spy | mG*mC*mA*CCCAUACCUUGGAGCAAGUUUUAGAGCUAGAAAUAGCAAGUUAAAAUAAGGCUAGUCCGUUAUCAAAAUGG |
| | guide; G017893 | CACCGAGUCGGU*mG*mC*mU |
| 235 | Exemplary Spy | mA*mU*mA*AUCUCCAUCCUCGUCCUGUUUUAGAGCUAGAAAUAGCAAGUUAAAAUAAGGCUAGUCCGUUAUCAAAAUGG |
| | guide; G017896 | CACCGAGUCGGU*mG*mC*mU |
| 236 | Exemplary Spy | mC*mC*mG*CCGUUGCUCCAAGGUAUGUUUUAGAmGmCmUmAmGmAmAmAmUmAmGmCAAGUUAAAAUAAGGCUAGUCCG |
| | guide; G018723 | UUAUCAmAmCmUmUmGmAmAmAmAmAmGmUmGmGmCmAmCmCmGmAmGmUmCmGmGmUmGmCmU*mU*mU*mU |
| 237 | Exemplary Spy | mG*mC*mA*CCCAUACCUUGGAGCAAGUUUUAGAmGmCmUmAmGmAmAmAmUmAmGmCAAGUUAAAAUAAGGCUAGUCCG |
| | guide; G018726 | UUAUCAmAmCmUmUmGmAmAmAmAmAmGmUmGmGmCmAmCmCmGmAmGmUmCmGmGmUmGmCmU*mU*mU*mU |
| 238 | Exemplary Nme | GGGCGCUUCGCCAGCCAUUCCUGCGUUGUAGCUCCCUUUCUCAUUUCGGAAACGAAAUGAGAACCGUUGCUACAAUAAGG |
| | guide; plCR012468 | CCGUCUGAAAAGAUGUGCCGCAACGCUCUGCCCCUUAAAGCUUCUGCUUUAAGGGGCAUCGUUUAU |
| 239 | Exemplary Nme | GCCGGGGCGGTCCCGGTCCAAGCGGUUGUAGCUCCCUUUCUCAUUUCGGAAACGAAAUGAGAACCGUUGCUACAAUAAGG |
| | guide; plCR012469 | CCGUCUGAAAAGAUGUGCCGCAACGCUCUGCCCCUUAAAGCUUCUGCUUUAAGGGGCAUCGUUUAU |
| 240 | Exemplary Nme | mG*mG*mC*CUGGCUGAUGAGGCCGCACAUGUUGUAGCUCCCU*mG*mA*mA*mA*CCGUUGCUACAAUAAGGCCGUmC* |
| | guide; G017564 | mU*mG*mA*mA*mA*mA*mGAUGUGCCGCAACGCUCUGCCG*mC*mU*mU*mC*mU*mG*CGGCAUCGUUU*mA*mU*mC |
| 241 | Exemplary Nme | mG*mG*mC*CUGGCUGAUGAGGCCGCACAUGUUGUAGCUCCCU*mG*mA*mA*mA*CCGUUGCUACAAUAAGGCCGUmC* |
| | guide; G017565 | mU*mG*mA*mA*mA*mA*mGAUGUGCCGCAACGCUCUGCCmU*mU*mC*mUGGCAUCGUUU*mA*mU*mC |
| 242 | Exemplary Nme | mG*mG*mC*CUGGCUGAUGAGGCCGCACAUGUUGUAGCUCCCU*mG*mA*mA*mA*CCGUUGCUACAAUAAGGCCGUmC* |
| | guide; G017566 | mG*mA*mA*mA*mGAUGUGCCGCAACGCUCUGCCmU*mU*mC*mUGGCAUCGUUU*mA*mU*mC |
| 243 | Exemplary Nme | mG*mGC*CUGGCUmGAUmGAGGCCGCACAUmGUUGmUmAmGmCUCCCUmC(L1)mGCCGUUmGmCUAmCAAU*A*AGmGm |
| | guide; G020362 | CCmGmUmC(L1)mGmAmUGUGCmCGCAACGCUCUmGmCC(L1)GGCAUCGUUU*AmU*mU |
| 244 | Exemplary Nme | mG*mGGGCCAGCmUUCmAGACACAAAUACmGUUGmUmAmGmCUCCCmUmGmAmAmAmCmCGUUmGmCUAmCAAU*AAGmG |
| | guide; G021237 | mCCmGmUmCmGmAmAmAmGmAmUGUGCmCGCmAmAmCmGCUCUmGmCCmUmUmCmUGmGCmAmUC*mG*mU*mU |
| 245 | Exemplary Nme | mU*mUUUCACAGmCCAmACGACUCUGGCCmGUUGmUmAmGmCUCCCmUmGmAmAmAmCmCGUUmGmCUAmCAAU*AAGG |
| | guide; G021238 | mCCmGmUmCmGmAmAmAmGmAmUGUGCmCGCmAmAmCmGCUCUmGmCCmUmUmCmUGmGCmAmUC*mG*mU*mU |
| 246 | Exemplary Nme | mC*mUGCCUCGGmACAmGCAUCCAGGACUmGUUGmUmAmGmCUCCCmUmGmAmAmAmCmCGUUmGmCUAmCAAU*AAGG |
| | guide; G021247 | mCCmGmUmCmGmAmAmAmGmAmUGUGCmCGCmAmAmCmGCUCUmGmCCmUmUmCmUGmGCmAmUC*mG*mU*mU |
| 247 | Exemplary Nme | mC*mCAAGUGUCmUUCmCAGUACGAUUUGmGUUGmUmAmGmCUCCCmUmGmAmAmAmCmCGUUmGmCUAmCAAU*AAGmG |
| | guide; G021256 | mCCmGmUmCmGmAmAmAmGmAmUGUGCmCGCmAmAmCmGCUCUmGmCCmUmUmCmUGmGCmAmUC*mG*mU*mU |
| 248 | Exemplary Nme | mU*mCUACAGCAmGGGmCUGCCUCGGACAmGUUGmUmAmGmCUCCCmUmGmAmAmAmCmCGUUmGmCUAmCAAU*AAGmG |
| | guide; G021275 | mCCmGmUmCmGmAmAmAmGmAmUGUGCmCGCmAmAmCmGCUCUmGmCCmUmUmCmUGmGCmAmUC*G*U*mU |
| 249 | Exemplary Nme | mC*mUUCACCAGmGAGmAAGCCGUCACACmGUUGmUmAmGmCUCCCmUmGmAmAmAmCmCGUUmGmCUAmCAAU*AAGmG |
| | guide; G021320 | mCCmGmUmCmGmAmAmAmGmAmUGUGCmCGCmAmAmCmGCUCUmGmCCmUmUmCmUGmGCmAmUC*mG*mU*mU |
| 250 | Exemplary Nme | mC*mU*mUmCmACCmAmGGmAGmAAGCCmGUCAmCACmGUUGmUmAmGmCUCCCmUmGmAmAmAmCmCGUUmGmCUAmCA |
| | guide; G021722 | AU*AAGmGmCCmGmUmCmGmAmAmAmGmAmUGUGCmCGmCAAmCGCUCUmGmCCmUmUmCmUGGCAUCG*mU*mU |
| 251 | Exemplary Nme | mC*mU*mU*mCmACCmAmGGmAGmAAGCCmGUCAmCACmGUUGmUmAmGmCUCCCmUmGmAmAmAmCmCGUUmGmCUAmC |
| | guide; G021845 | AAU*AAGmGmCCmGmUmCmGmAmAmAmGmAmUGUGCmCGmCAAmCGCUCUmGmCCmUmUmCmUGGCAUCG*mU*mU |
| 252 | Exemplary Nme | mC*mU*mU*mCmACCmAmGGmAGmAAGCCmGUCAmCACmGUUGmUmAmGmCUCCCmUmUmC(L1)mGmAmCmCGUUmGmC |
| | guide; G021846 | UAmCAAU*AAGmGmCCmGmUmC(L1)mGmAmUGUGCmCGmCAAmCGCUCUmGmCC(L1)GGCAUCG*mU*mU |
| 253 | Exemplary Nme | mC*mU*mU*mCmACCmAmAGmAGmAAGCCmGUCAmCACmGUUGmUmAmGmCUCCCmUmUmC(L1)mGmAmCmCGUUmGmC |
| | guide; G023420 | UAmCAAU*AAGmGmCCmGmUmC(L1)mGmAmUGUGCmCGmCAAmCGCUCUmGmCC(L1)GGCAUCGmU*mU |
| 254 | Exemplary Spy | CUCCCUGAUGGAGAUGACAGGUUUUAGAGCUAGAAAUAGCAAGUUAAAAUAAGGCUAGUCCGUUAUCAACUUGAAAAAGU |
| | guide; plG000665 | GGCACCGAGUCGGUGCUUUU |
| 255 | Exemplary Spy | CACCUUGGCUGUAGUCAUCUGUUUUAGAGCUAGAAAUAGCAAGUUAAAAUAAGGCUAGUCCGUUAUCAACUUGAAAAAGU |
| | guide; plG012746 | GGCACCGAGUCGGUGCUUUUUUUGGUACCGGUACC |
| 256 | Exemplary Spy | CAGUGCGGUUCCACACAUACGUUUUAGAGCUAGAAAUAGCAAGUUAAAAUAAGGCUAGUCCGUUAUCAACUUGAAAAAGU |
| | guide; plG012684 | GGCACCGAGUCGGUGCUUUUUUUGGUACCGGUACC |
| 257 | Exemplary Spy | AAGCCUGCAUGAGCUCAGUGGUUUUAGAGCUAGAAAUAGCAAGUUAAAAUAAGGCUAGUCCGUUAUCAACUUGAAAAAGU |
| | guide; plG012685 | GGCACCGAGUCGGUGCUUUUUUUGGUACCGGUACC |
| 258 | Exemplary Spy | AUGGGUCACAGACGGGUCCAGUUUUAGAGCUAGAAAUAGCAAGUUAAAAUAAGGCUAGUCCGUUAUCAACUUGAAAAAGU |
| | guide; plG012686 | GGCACCGAGUCGGUGCUUUUUUUGGUACCGGUACC |
| 259 | Exemplary Spy | CUCAAAGAGACCCAUGAGAUGUUUUAGAGCUAGAAAUAGCAAGUUAAAAUAAGGCUAGUCCGUUAUCAACUUGAAAAAGU |
| | guide; plG012687 | GGCACCGAGUCGGUGCUUUUUUUGGUACCGGUACC |
| 260 | Exemplary Spy | AUCUCGUAUUUCAUGUCUCCGUUUUAGAGCUAGAAAUAGCAAGUUAAAAUAAGGCUAGUCCGUUAUCAACUUGAAAAAGU |
| | guide; plG012688 | GGCACCGAGUCGGUGCUUUUUUUGGUACCGGUACC |
| 261 | Target sequence of | UGGCGCUUCGCCAGCCAUUCCUGC |
| | plCR012468 | |
| 262 | Target sequence of | CCCGGGGCGGUCCCGGUCCAAGCG |
| | plCR012469 | |
| 263 | Target sequence of | CUCCCUGAUGGAGAUGACAG |
| | plG000665 | |
| 264 | Target sequence of | CACCUUGGCUGUAGUCAUCU |
| | plG012746 | |
| 265 | Target sequence of | CAGUGCGGUUCCACACAUAC |
| | plG012684 | |
| 266 | Target sequence of | AAGCCUGCAUGAGCUCAGUG |
| | plG012685 | |
| 267 | Target sequence of | AUGGGUCACAGACGGGUCCA |
| | plG012686 | |
| 268 | Target sequence of | CUCAAAGAGACCCAUGAGAU |
| | plG012687 | |
| 269 | Target sequence of | AUCUCGUAUUUCAUGUCUCC |
| | plG012688 | |
| 301 | Exemplary XTEN | SGSETPGTSESATPES |
| 302 | Exemplary XTEN | SGSETPGTSESA |
| 303 | Exemplary XTEN | SGSETPGTSESATPEGGSGGS |
| 304 | amino acid | GGS |
| | sequence for | |
| | exemplary linker | |
| 305 | amino acid | GGGGS |
| | sequence for | |
| | exemplary linker | |
| 306 | amino acid | EAAAK |
| | sequence for | |
| | exemplary linker | |
| 307 | amino acid | SEGSA |
| | sequence for | |
| | exemplary linker | |
| 308 | amino acid | SEGSAGTST |
| | sequence for | |
| | exemplary linker | |
| 309 | amino acid | GGGGSGGGGS |
| | sequence for | |
| | exemplary linker | |
| 310 | amino acid | GGGGSEAAAK |
| | sequence for | |
| | exemplary linker | |
| 311 | amino acid | EAAAKGGGGS |
| | sequence for | |
| | exemplary linker | |
| 312 | amino acid | EAAAKEAAAK |
| | sequence for | |
| | exemplary linker | |
| 313 | amino acid | SEGSAGTSTESEGSA |
| | sequence for | |
| | exemplary linker | |
| 314 | amino acid | GGGGSGGGGSGGGGS |
| | sequence for | |
| | exemplary linker | |
| 315 | amino acid | GGGGSGGGGSEAAAK |
| | sequence for | |
| | exemplary linker | |
| 316 | amino acid | GGGGSEAAAKGGGGS |
| | sequence for | |
| | exemplary linker | |
| 317 | amino acid | EAAAKGGGGSEAAAK |
| | sequence for | |
| | exemplary linker | |
| 318 | amino acid | EAAAKEAAAKGGGGS |
| | sequence for | |
| | exemplary linker | |
| 319 | amino acid | SEGSAGTSTESEGSAGTSTE |
| | sequence for | |
| | exemplary linker | |
| 320 | amino acid | GGGGSGGGGSGGGGSEAAAK |
| | sequence for | |
| | exemplary linker | |
| 321 | amino acid | GGGGSGGGGSEAAAKGGGGS |
| | sequence for | |
| | exemplary linker | |
| 322 | amino acid | GGGGSEAAAKGGGGSEAAAK |
| | sequence for | |
| | exemplary linker | |
| 323 | amino acid | GGGGSEAAAKEAAAKGGGGS |
| | sequence for | |
| | exemplary linker | |
| 324 | amino acid | GGGGSEAAAKEAAAKEAAAK |
| | sequence for | |
| | exemplary linker | |
| 325 | amino acid | EAAAKGGGGSGGGGSGGGGS |
| | sequence for | |
| | exemplary linker | |
| 326 | amino acid | EAAAKGGGGSGGGGSEAAAK |
| | sequence for | |
| | exemplary linker | |
| 327 | amino acid | EAAAKGGGGSEAAAKGGGGS |
| | sequence for | |
| | exemplary linker | |
| 328 | amino acid | EAAAKGGGGSEAAAKEAAAK |
| | sequence for | |
| | exemplary linker | |
| 329 | amino acid | EAAAKEAAAKGGGGSGGGGS |
| | sequence for | |
| | exemplary linker | |
| 330 | amino acid | EAAAKEAAAKGGGGSEAAAK |
| | sequence for | |
| | exemplary linker | |
| 331 | amino acid | EAAAKEAAAKEAAAKGGGGS |
| | sequence for | |
| | exemplary linker | |
| 332 | amino acid | SEGSAGTSTESEGSAGTSTESEGSA |
| | sequence for | |
| | exemplary linker | |
| 333 | amino acid | GGGGSGGGGSGGGGSGGGGSGGGGS |
| | sequence for | |
| | exemplary linker | |
| 334 | amino acid | GGGGSGGGGSGGGGSGGGGSEAAAK |
| | sequence for | |
| | exemplary linker | |
| 335 | amino acid | GGGGSGGGGSGGGGSEAAAKGGGGS |
| | sequence for | |
| | exemplary linker | |
| 336 | amino acid | GGGGSGGGGSGGGGSEAAAKEAAAK |
| | sequence for | |
| | exemplary linker | |
| 337 | amino acid | GGGGSGGGGSEAAAKGGGGSGGGGS |
| | sequence for | |
| | exemplary linker | |
| 338 | amino acid | GGGGSGGGGSEAAAKGGGGSEAAAK |
| | sequence for | |
| | exemplary linker | |
| 339 | amino acid | GGGGSGGGGSEAAAKEAAAKGGGGS |
| | sequence for | |
| | exemplary linker | |
| 340 | amino acid | GGGGSGGGGSEAAAKEAAAKEAAAK |
| | sequence for | |
| | exemplary linker | |
| 341 | amino acid | GGGGSEAAAKGGGGSGGGGSGGGGS |
| | sequence for | |
| | exemplary linker | |
| 342 | amino acid | GGGGSEAAAKGGGGSGGGGSEAAAK |
| | sequence for | |
| | exemplary linker | |
| 343 | amino acid | GGGGSEAAAKGGGGSEAAAKGGGGS |
| | sequence for | |
| | exemplary linker | |
| 344 | amino acid | GGGGSEAAAKGGGGSEAAAKEAAAK |
| | sequence for | |
| | exemplary linker | |
| 345 | amino acid | GGGGSEAAAKEAAAKGGGGSGGGGS |
| | sequence for | |
| | exemplary linker | |
| 346 | amino acid | GGGGSEAAAKEAAAKEAAAKGGGGS |
| | sequence for | |
| | exemplary linker | |
| 347 | amino acid | GGGGSEAAAKEAAAKEAAAKEAAAK |
| | sequence for | |
| | exemplary linker | |
| 348 | amino acid | EAAAKGGGGSGGGGSGGGGSGGGGS |
| | sequence for | |
| | exemplary linker | |
| 349 | amino acid | EAAAKGGGGSGGGGSGGGGSEAAAK |
| | sequence for | |
| | exemplary linker | |
| 350 | amino acid | EAAAKGGGGSGGGGSEAAAKGGGGS |
| | sequence for | |
| | exemplary linker | |
| 351 | amino acid | EAAAKGGGGSGGGGSEAAAKEAAAK |
| | sequence for | |
| | exemplary linker | |
| 352 | amino acid | EAAAKGGGGSEAAAKGGGGSGGGGS |
| | sequence for | |
| | exemplary linker | |
| 353 | amino acid | EAAAKGGGGSEAAAKGGGGSEAAAK |
| | sequence for | |
| | exemplary linker | |
| 354 | amino acid | EAAAKGGGGSEAAAKEAAAKGGGGS |
| | sequence for | |
| | exemplary linker | |
| 355 | amino acid | EAAAKGGGGSEAAAKEAAAKEAAAK |
| | sequence for | |
| | exemplary linker | |
| 356 | amino acid | EAAAKEAAAKGGGGSEAAAKGGGGS |
| | sequence for | |
| | exemplary linker | |
| 357 | amino acid | EAAAKEAAAKGGGGSEAAAKEAAAK |
| | sequence for | |
| | exemplary linker | |
| 358 | amino acid | EAAAKEAAAKEAAAKGGGGSEAAAK |
| | sequence for | |
| | exemplary linker | |
| 359 | amino acid | EAAAKEAAAKEAAAKEAAAKGGGGS |
| | sequence for | |
| | exemplary linker | |
| 360 | amino acid | EAAAKEAAAKEAAAKEAAAKEAAAK |
| | sequence for | |
| | exemplary linker | |
| 361 | amino acid | GTKDSTKDIPETPSKD |
| | sequence for | |
| | exemplary linker | |
| 362 | amino acid | GRDVRQPEVKEEKPES |
| | sequence for | |
| | exemplary linker | |
| 363 | amino acid | EGKSSGSGSESKSTAG |
| | sequence for | |
| | exemplary linker | |
| 364 | amino acid | TPGSPAGSPTSTEEGT |
| | sequence for | |
| | exemplary linker | |
| 365 | amino acid | GSEPATSGSETPGTST |
| | sequence for | |
| | exemplary linker | |
| 366 | SV40 NLS | PKKKRKVE |
| 367 | SV40 NLS | KKKRKVE |
| 368 | bipartite NLS | KRTADGSEFESPKKKRKVE |
| 369 | c-myc like NLS | PAAKKKKLD |
| 370 | Nucleic acid | CCCAAGAAGAAGAGGAAAGTC |
| | sequence for SV40 | |
| | NLS | |
| 371 | Amino acid | PKKKRKV |
| | sequence for SV40 | |
| | NLS | |
| 372 | Exemplary NLS 1 | LAAKRSRTT |
| 373 | Exemplary NLS 2 | QAAKRSRTT |
| 374 | Exemplary NLS 3 | PAPAKRERTT |
| 375 | Exemplary NLS 4 | QAAKRPRTT |
| 376 | Exemplary NLS 5 | RAAKRPRTT |
| 377 | Exemplary NLS 6 | AAAKRSWSMAA |
| 378 | Exemplary NLS 7 | AAAKRVWSMAF |
| 379 | Exemplary NLS 8 | AAAKRSWSMAF |
| 380 | Exemplary NLS 9 | AAAKRKYFAA |
| 381 | Exemplary NLS 10 | RAAKRKAFAA |
| 382 | Exemplary NLS 11 | RAAKRKYFAV |
| 383 | Alternative SV40 | PKKKRRV |
| | NLS | |
| 384 | Nucleoplasmin NLS | KRPAATKKAGQAKKKK |
| 385 | Exemplary coding | CCGAAGAAGAAGAGAAAGGTC |
| | sequence for SV40 | |
| | NLS | |
| 386 | Exemplary coding | CTGGCAGCAAAGAGAAGCAGAACAACA |
| | sequence for NLS1 | |
| 387 | Exemplary coding | CAGGCAGCAAAGAGAAGCAGAACAACA |
| | sequence for NLS2 | |
| 388 | Exemplary coding | CCGGCACCGGCAAAGAGAGAAAGAACAACA |
| | sequence for NLS3 | |
| 389 | Exemplary coding | CAGGCAGCAAAGAGACCGAGAACAACA |
| | sequence for NLS4 | |
| 390 | Exemplary coding | AGAGCAGCAAAGAGACCGAGAACAACA |
| | sequence for NLS5 | |
| 391 | Exemplary coding | GCAGCAGCAAAGAGAAGCTGGAGCATGGCAGCA |
| | sequence for NLS6 | |
| 392 | Exemplary coding | GCAGCAGCAAAGAGAGTCTGGAGCATGGCATTC |
| | sequence for NLS7 | |
| 393 | Exemplary coding | GCAGCAGCAAAGAGAAGCTGGAGCATGGCATTC |
| | sequence for NLS8 | |
| 394 | Exemplary coding | GCAGCAGCAAAGAGAAAGTACTTCGCAGCA |
| | sequence for NLS9 | |
| 395 | Exemplary coding | AGAGCAGCAAAGAGAAAGGCATTCGCAGCA |
| | sequence for NLS10 | |
| 396 | Exemplary coding | AGAGCAGCAAAGAGAAAGTACTTCGCAGTC |
| | sequence for NLS11 | |
| 397 | Exemplary coding | CCGAAGAAGAAGAGAAGAGTC |
| | sequence for | |
| | alternate SV40 NLS | |
| 398 | Exemplary 5′ UTR | ACATTTGCTTCTGACACAACTGTGTTCACTAGCAACCTCAAACAGACACC |
| 399 | Exemplary 5′ UTR | CATAAACCCTGGCGCGCTCGCGGCCCGGCACTCTTCTGGTCCCCACAGACTCAGAGAGAACCCACC |
| 400 | Exemplary 5′ UTR | AAGCTCAGAATAAACGCTCAACTTTGGCC |
| 401 | Exemplary 5′ UTR | CAGGGTCCTGTGGACAGCTCACCAGCT |
| 402 | Exemplary 5′ UTR | TCCCGCAGTCGGCGTCCAGCGGCTCTGCTTGTTCGTGTGTGTGTCGTTGCAGGCCTTATTC |
| 403 | Exemplary 5′ UTR | CAGATCGCCTGGAGACGCCATCCACGCTGTTTTGACCTCCAT |
| 404 | Exemplary 5′ UTR | AGAAGACACCGGGACCGATCCAGCCTCCGCGGCCGGGAACGG |
| 405 | Exemplary 5′ UTR | TGCATTGGAACGCGGATTCCCCGTGCCAAGAGTGACTCACCG |
| 406 | Exemplary 3′ UTR | GCTCGCTTTCTTGCTGTCCAATTTCTATTAAAGGTTCCTTTGTTCCCTAAGTCCAACTACTAAACTGGGGGATATTATGA |
| | | AGGGCCTTGAGCATCTGGATTCTGCCTAATAAAAAACATTTATTTTCATTGC |
| 407 | Exemplary 3′ UTR | GCTGGAGCCTCGGTGGCCATGCTTCTTGCCCCTTGGGCCTCCCCCCAGCCCCTCCTCCCCTTCCTGCACCCGTACCCCCG |
| | | TGGTCTTTGAATAAAGTCTGAGTGGGCGGC |
| 408 | Exemplary 3′ UTR | ACCAGCCTCAAGAACACCCGAATGGAGTCTCTAAGCTACATAATACCAACTTACACTTTACAAAATGTTGTCCCCCAAAA |
| | | TGTAGCCATTCGTATCTGCTCCTAATAAAAAGAAAGTTTCTTCACATTCT |
| 409 | Exemplary 3′ UTR | TTGCCAGCCATCTGTTGTTTGCCCCTCCCCCGTGCCTTCCTTGACCCTGGAAGGTGCCACTCCCACTGTCCTTTCCTAAT |
| | | AAAATGAGGAAATTGCATCGCA |
| 410 | Exemplary 3′ UTR | GCTGCCTTCTGCGGGGCTTGCCTTCTGGCCATGCCCTTCTTCTCTCCCTTGCACCTGTACCTCTTGGTCTTTGAATAAAG |
| | | CCTGAGTAGGAAG |
| 411 | Exemplary 3′ UTR | CTGGTACTGCATGCACGCAATGCTAGCTGCCCCTTTCCCGTCCTGGGTACCCCGAGTCTCCCCCGACCTCGGGTCCCAGG |
| | | TATGCTCCCACCTCCACCTGCCCCACTCACCACCTCTGCTAGTTCCAGACACCTCCCAAGCACGCAGCAATGCAGCTCAA |
| | | AACGCTTAGCCTAGCCACACCCCCACGGGAAACAGCAGTGATTAACCTTTAGCAATAAACGAAAGTTTAACTAAGCTATA |
| | | CTAACCCCAGGGTTGGTCAATTTCGTGCCAGCCACACC |
| 412 | Exemplary 3′ UTR | CAAGCACGCAGCAATGCAGCTCAAAACGCTTAGCCTAGCCACACCCCCACGGGAAACAGCAGTGATTAACCTTTAGCAAT |
| | | AAACGAAAGTTTAACTAAGCTATACTAACCCCAGGGTTGGTCAATTTCGTGCCAGCCACACCCTGGTACTGCATGCACGC |
| | | AATGCTAGCTGCCCCTTTCCCGTCCTGGGTACCCCGAGTCTCCCCCGACCTCGGGTCCCAGGTATGCTCCCACCTCCACC |
| | | TGCCCCACTCACCACCTCTGCTAGTTCCAGACACCTCC |
| 413 | Exemplary 3′ UTR | ACCAGCCTCAAGAACACCCGAATGGAGTCTCTAAGCTACATAATACCAACTTACACTTTACAAAATGTTGTCCCCCAAAA |
| | | TGTAGCCATTCGTATCTGCTCCTAATAAAAAGAAAGTTTCTTCACATTCTACCAGCCTCAAGAACACCCGAATGGAGTCT |
| | | CTAAGCTACATAATACCAACTTACACTTTACAAAATGTTGTCCCCCAAAATGTAGCCATTCGTATCTGCTCCTAATAAAA |
| | | AGAAAGTTTCTTCACATTCT |
| 414 | Exemplary Kozak | GCCRCCAUGG |
| | sequence | |
| 415 | Exemplary Kozak | GCCGCCRCCAUGG |
| | sequence | |
| 416 | Exemplary poly-A | AAAAAAAAAAAAAAAAAAAAAAAAAAAAAAGCGAAAAAAAAAAAAAAAAAAAAAAAAAAAAAACCGAAAAAAAAAAAAAA |
| | sequence | AAAAAAAAAAAAAAAAAAAAAAAAA |

TABLE 39
Exemplary SpyCas9 sgRNA conserved portion (“Exemplary SpyCas9 sgRNA-1”; SEQ ID NO: 161)

| 1 | 2 | 3 | 4 | 5 | 6 | 7 | 8 | 9 | 10 | 11 | 12 | 13 | 14 | 15 | 16 | 17 | 18 | 19 | 20 | 21 | 22 | 23 | 24 | 25 | 26 | 27 | 28 | 29 | 30 |
|---|---|---|---|---|---|---|---|---|---|---|---|---|---|---|---|---|---|---|---|---|---|---|---|---|---|---|---|---|---|
| G | U | U | U | U | A | G | A | G | C | U | A | G | A | A | A | U | A | G | C | A | A | G | U | U | A | A | A | A | U |
| LS1-LS6 | | | | | | B1-B2 | | US1-US12 | | | | | | | | | | | | B2-B6 | | | | LS7-LS12 | | | | | |
| 31 | 32 | 33 | 34 | 35 | 36 | 37 | 38 | 39 | 40 | 41 | 42 | 43 | 44 | 45 | 46 | 47 | 48 | 49 | 50 | 51 | 52 | 53 | 54 | 55 | 56 | 57 | 58 | 59 | 60 |
| A | A | G | G | C | U | A | G | U | C | C | G | U | U | A | U | C | A | A | C | U | U | G | A | A | A | A | A | G | U |

| Nexus | | | | | | | | | H1-1 through H1-12 | | | | | | |
|---|---|---|---|---|---|---|---|---|---|---|---|---|---|---|---|
| 61 | 62 | 63 | 64 | 65 | 66 | 67 | 68 | 69 | 70 | 71 | 72 | 73 | 74 | 75 | 76 |
| G | G | C | A | C | C | G | A | G | U | C | G | G | U | G | C |

| | |
|---|---|
| N | H2-1 through H2-15 |

TABLE 40
Exemplary NmeCas9 sgRNA (SEQ ID NO: 279 (“Exemplary NmeCas9 sgRNA-1)

| | | | | | | | | | | | | | | | | | | | | | | | | |
|---|---|---|---|---|---|---|---|---|---|---|---|---|---|---|---|---|---|---|---|---|---|---|---|---|
| 1-24 | 25 | 26 | 27 | 28 | 29 | 30 | 31 | 32 | 33 | 34 | 35 | 36 | 37 | 38 | 39 | 40 | 41 | 42 | 43 | 44 | 45 | 46 | 47 | 48 |
| NNNNNNNNNNNNNNNNNNNNNNNN | G | U | U | G | U | A | G | C | U | C | C | C | U | U | U | C | U | C | A | U | U | U | C | G |

| | | | | | | | | | | | Lower stem | | | | | | | | | Upper stem | | | | | | | | |
|---|---|---|---|---|---|---|---|---|---|---|---|---|---|---|---|---|---|---|---|---|---|---|---|---|---|---|---|---|
| Guide region | | | | | | | | | | | Repeat/Anti-Repeat region | | | | | | | | | | | | | | | | | |
| 49 | 50 | 51 | 52 | 53 | 54 | 55 | 56 | 57 | 58 | 59 | 60 | 61 | 62 | 63 | 64 | 65 | 66 | 67 | 68 | 69 | 70 | 71 | 72 | 73 | 74 | 75 | 76 | 77 |
| G | A | A | A | C | G | A | A | A | U | G | A | G | A | A | C | C | G | U | U | G | C | U | A | C | A | A | U | A |

| | | |
|---|---|---|
| Loop | Upper stem | Lower Stem |

Repeat/Anti-Repeat region

| | | | | | | | | | | | | | | | | | | | | | | | | | | | | | | |
|---|---|---|---|---|---|---|---|---|---|---|---|---|---|---|---|---|---|---|---|---|---|---|---|---|---|---|---|---|---|---|
| 78 | 79 | 80 | 81 | 82 | 83 | 84 | 85 | 86 | 87 | 88 | 89 | 90 | 91 | 92 | 93 | 94 | 95 | 96 | 97 | 98 | 99 | 100 | 101 | 102 | 103 | 104 | 105 | 106 | 107 | 108 |
| A | G | G | C | C | G | U | C | U | G | A | A | A | A | G | A | U | G | U | G | C | C | G | C | A | A | C | G | C | U | C |

| | | | | |
|---|---|---|---|---|
| Stem | Loop | Stem (96: unpaired) | Lower stem | Bulge |

| | |
|---|---|
| Hairpin 1 | Hairpin 2 |

| | | | | | | | | | | | | | | | | | | | | | | | | | |
|---|---|---|---|---|---|---|---|---|---|---|---|---|---|---|---|---|---|---|---|---|---|---|---|---|---|
| 109 | 110 | 111 | 112 | 113 | 114 | 115 | 116 | 117 | 118 | 119 | 120 | 121 | 122 | 123 | 124 | 125 | 126 | 127 | 128 | 129 | 130 | 131 | 132 | 133 | 134 |
| U | G | C | C | C | C | U | U | A | A | A | G | C | U | U | C | U | G | C | U | U | U | A | A | G | G |

| | | |
|---|---|---|
| Upper Stem | Loop | Upper Stem |

Hairpin 2

| | | | | | | | | | | |
|---|---|---|---|---|---|---|---|---|---|---|
| 135 | 136 | 137 | 138 | 139 | 140 | 141 | 142 | 143 | 144 | 145 |
| G | G | C | A | U | C | G | U | U | U | A |

| | | |
|---|---|---|
| Upper Stem | Bulge | Lower Stem |

| | |
|---|---|
| Hairpin 2 | Tail |

The application's sequence listing, which the Patent Office published only in electronic form, follows.

SEQUENCE LISTING (424 sequences)

SEQ ID NO: 1 - RNA, 8218 nt, synthetic construct
  misc_feature 1..8218: note = Synthetic: Cas9-Cas9 fusion(mRNA A)-mRNA sequence
  source 1..8218: mol_type = other RNA
gggaagctcagaataaacgctcaactttggccggatctgccaccatggacaagaagtactccatcggcctggacatcggcaccaactccgtgggctgggccgtgatcaccgacgagtacaaggtgccctccaagaagttcaaggtgctgggcaacaccgaccggcactccatcaagaagaacctgatcggcgccctgctgttcgactccggcgagaccgccgaggccacccggctgaagcggaccgcccggcggcggtacacccggcggaagaaccggatctgctacctgcaggagatcttctccaacgagatggccaaggtggacgactccttcttccaccggctggaggagtccttcctggtggaggaggacaagaagcacgagcggcaccccatcttcggcaacatcgtggacgaggtggcctaccacgagaagtaccccaccatctaccacctgcggaagaagctggtggactccaccgacaaggccgacctgcggctgatctacctggccctggcccacatgatcaagttccggggccacttcctgatcgagggcgacctgaaccccgacaactccgacgtggacaagctgttcatccagctggtgcagacctacaaccagctgttcgaggagaaccccatcaacgcctccggcgtggacgccaaggccatcctgtccgcccggctgtccaagtcccggcggctggagaacctgatcgcccagctgcccggcgagaagaagaacggcctgttcggcaacctgatcgccctgtccctgggcctgacccccaacttcaagtccaacttcgacctggccgaggacgccaagctgcagctgtccaaggacacctacgacgacgacctggacaacctgctggcccagatcggcgaccagtacgccgacctgttcctggccgccaagaacctgtccgacgccatcctgctgtccgacatcctgcgggtgaacaccgagatcaccaaggcccccctgtccgcctccatgatcaagcggtacgacgagcaccaccaggacctgaccctgctgaaggccctggtgcggcagcagctgcccgagaagtacaaggagatcttcttcgaccagtccaagaacggctacgccggctacatcgacggcggcgcctcccaggaggagttctacaagttcatcaagcccatcctggagaagatggacggcaccgaggagctgctggtgaagctgaaccgggaggacctgctgcggaagcagcggaccttcgacaacggctccatcccccaccagatccacctgggcgagctgcacgccatcctgcggcggcaggaggacttctaccccttcctgaaggacaaccgggagaagatcgagaagatcctgaccttccggatcccctactacgtgggccccctggcccggggcaactcccggttcgcctggatgacccggaagtccgaggagaccatcaccccctggaacttcgaggaggtggtggacaagggcgcctccgcccagtccttcatcgagcggatgaccaacttcgacaagaacctgcccaacgagaaggtgctgcccaagcactccctgctgtacgagtacttcaccgtgtacaacgagctgaccaaggtgaagtacgtgaccgagggcatgcggaagcccgccttcctgtccggcgagcagaagaaggccatcgtggacctgctgttcaagaccaaccggaaggtgaccgtgaagcagctgaaggaggactacttcaagaagatcgagtgcttcgactccgtggagatctccggcgtggaggaccggttcaacgcctccctgggcacctaccacgacctgctgaagatcatcaaggacaaggacttcctggacaacgaggagaacgaggacatcctggaggacatcgtgctgaccctgaccctgttcgaggaccgggagatgatcgaggagcggctgaagacctacgcccacctgttcgacgacaaggtgatgaagcagctgaagcggcggcggtacaccggctggggccggctgtcccggaagctgatcaacggcatccgggacaagcagtccggcaagaccatcctggacttcctgaagtccgacggcttcgccaaccggaacttcatgcagctgatccacgacgactccctgaccttcaaggaggacatccagaaggcccaggtgtccggccagggcgactccctgcacgagcacatcgccaacctggccggctcccccgccatcaagaagggcatcctgcagaccgtgaaggtggtggacgagctggtgaaggtgatgggccggcacaagcccgagaacatcgtgatcgagatggcccgggagaaccagaccacccagaagggccagaagaactcccgggagcggatgaagcggatcgaggagggcatcaaggagctgggctcccagatcctgaaggagcaccccgtggagaacacccagctgcagaacgagaagctgtacctgtactacctgcagaacggccgggacatgtacgtggaccaggagctggacatcaaccggctgtccgactacgacgtggaccacatcgtgccccagtccttcctgaaggacgactccatcgacaacaaggtgctgacccggtccgacaagaaccggggcaagtccgacaacgtgccctccgaggaggtggtgaagaagatgaagaactactggcggcagctgctgaacgccaagctgatcacccagcggaagttcgacaacctgaccaaggccgagcggggcggcctgtccgagctggacaaggccggcttcatcaagcggcagctggtggagacccggcagatcaccaagcacgtggcccagatcctggactcccggatgaacaccaagtacgacgagaacgacaagctgatccgggaggtgaaggtgatcaccctgaagtccaagctggtgtccgacttccggaaggacttccagttctacaaggtgcgggagatcaacaactaccaccacgcccacgacgcctacctgaacgccgtggtgggcaccgccctgatcaagaagtaccccaagctggagtccgagttcgtgtacggcgactacaaggtgtacgacgtgcggaagatgatcgccaagtccgagcaggagatcggcaaggccaccgccaagtacttcttctactccaacatcatgaacttcttcaagaccgagatcaccctggccaacggcgagatccggaagcggcccctgatcgagaccaacggcgagaccggcgagatcgtgtgggacaagggccgggacttcgccaccgtgcggaaggtgctgtccatgccccaggtgaacatcgtgaagaagaccgaggtgcagaccggcggcttctccaaggagtccatcctgcccaagcggaactccgacaagctgatcgcccggaagaaggactgggaccccaagaagtacggcggcttcgactcccccaccgtggcctactccgtgctggtggtggccaaggtggagaagggcaagtccaagaagctgaagtccgtgaaggagctgctgggcatcaccatcatggagcggtcctccttcgagaagaaccccatcgacttcctggaggccaagggctacaaggaggtgaagaaggacctgatcatcaagctgcccaagtactccctgttcgagctggagaacggccggaagcggatgctggcctccgccggcgagctgcagaagggcaacgagctggccctgccctccaagtacgtgaacttcctgtacctggcctcccactacgagaagctgaagggctcccccgaggacaacgagcagaagcagctgttcgtggagcagcacaagcactacctggacgagatcatcgagcagatctccgagttctccaagcgggtgatcctggccgacgccaacctggacaaggtgctgtccgcctacaacaagcaccgggacaagcccatccgggagcaggccgagaacatcatccacctgttcaccctgaccaacctgggcgcccccgccgccttcaagtacttcgacaccaccatcgacaagaagcggtacacctccaccaaggaggtgctggacgccaccctgatccaccagtccatcaccggcctgtacgagacccggatcgacctgtcccagctgggcggcgacggcgcccccgagtccgccaccgagtccggcggcacctccaccgagtccgagggctccgccggcacctccaccgagtccgagggctccgccggctccgccggctccacctccaccgaggagggcacctccaccgagtccgagggctccgccggcacctccaccgagtccgagggctccgccggcacctccgagtccgccaccgagtccggcggcacctccaccgagtccgagggctcctcctccggtgccgccttcaagcccaaccccatcaactacatcctgggcctggacatcggcatcgcctccgtgggctgggccatggtggagatcgacgaggaggagaaccccatccggctgatcgacctgggcgtgcgggtgttcgagcgggccgaggtgcccaagaccggcgactccctggccatggcccggcggctggcccggtccgtgcggcggctgacccggcggcgggcccaccggctgctgcgggcccggcggctgctgaagcgggagggcgtgctgcaggccgccgacttcgacgagaacggcctgatcaagtccctgcccaacaccccctggcagctgcgggccgccgccctggaccggaagctgacccccctggagtggtccgccgtgctgctgcacctgatcaagcaccggggctacctgtcccagcggaagaacgagggcgagaccgccgacaaggagctgggcgccctgctgaagggcgtggccaacaacgcccacgccctgcagaccggcgacttccggacccccgccgagctggccctgaacaagttcgagaaggagtccggccacatccggaaccagcggggcgactactcccacaccttctcccggaaggacctgcaggccgagctgatcctgctgttcgagaagcagaaggagttcggcaacccccacgtgtccggcggcctgaaggagggcatcgagaccctgctgatgacccagcggcccgccctgtccggcgacgccgtgcagaagatgctgggccactgcaccttcgagcccgccgagcccaaggccgccaagaacacctacaccgccgagcggttcatctggctgaccaagctgaacaacctgcggatcctggagcagggctccgagcggcccctgaccgacaccgagcgggccaccctgatggacgagccctaccggaagtccaagctgacctacgcccaggcccggaagctgctgggcctggaggacaccgccttcttcaagggcctgcggtacggcaaggacaacgccgaggcctccaccctgatggagatgaaggcctaccacgccatctcccgggccctggagaaggagggcctgaaggacaagaagtcccccctgaacctgtcctccgagctgcaggacgagatcggcaccgccttctccctgttcaagaccgacgaggacatcaccggccggctgaaggaccgggtgcagcccgagatcctggaggccctgctgaagcacatctccttcgacaagttcgtgcagatctccctgaaggccctgcggcggatcgtgcccctgatggagcagggcaagcggtacgacgaggcctgcgccgagatctacggcgaccactacggcaagaagaacaccgaggagaagatctacctgccccccatccccgccgacgagatccggaaccccgtggtgctgcgggccctgtcccaggcccggaaggtgatcaacggcgtggtgcggcggtacggctcccccgcccggatccacatcgagaccgcccgggaggtgggcaagtccttcaaggaccggaaggagatcgagaagcggcaggaggagaaccggaaggaccgggagaaggccgccgccaagttccgggagtacttccccaacttcgtgggcgagcccaagtccaaggacatcctgaagctgcggctgtacgagcagcagcacggcaagtgcctgtactccggcaaggagatcaacctggtgcggctgaacgagaagggctacgtggagatcgaccacgccctgcccttctcccggacctgggacgactccttcaacaacaaggtgctggtgctgggctccgagaaccagaacaagggcaaccagaccccctacgagtacttcaacggcaaggacaactcccgggagtggcaggagttcaaggcccgggtggagacctcccggttcccccggtccaagaagcagcggatcctgctgcagaagttcgacgaggacggcttcaaggagtgcaacctgaacgacacccggtacgtgaaccgcttcctgtgccagttcgtggccgaccacatcctgctgaccggcaagggcaagcggcgggtgttcgcctccaacggccagatcaccaacctgctgcggggcttctggggcctgcggaaggtgcgggccgagaacgaccggcaccacgccctggacgccgtggtggtggcctgctccaccgtggccatgcagcagaagatcacccggttcgtgcggtacaaggagatgaacgccttcgacggcaagaccatcgacaaggagaccggcaaggtgctgcaccagaagacccacttcccccagccctgggagttcttcgcccaggaggtgatgatccgggtgttcggcaagcccgacggcaagcccgagttcgaggaggccgacacccccgagaagctgcggaccctgctggccgagaagctgtcctcccggcccgaggccgtgcacgagtacgtgacccccctgttcgtgtcccgggcccccaaccggaagatgtccggcgcccacaaggacaccctgcggtccgccaagcggttcgtgaagcacaacgagaagatctccgtgaagcgggtgtggctgaccgagatcaagctggccgacctggagaacatggtgaactacaagaacggccgggagatcgagctgtacgaggccctgaaggcccggctggaggcctacggcggcaacgccaagcaggccttcgaccccaaggacaaccccttctacaagaagggcggccagctggtgaaggccgtgcgggtggagaagacccaggagtccggcgtgctgctgaacaagaagaacgcctacaccatcgccgacaacggcgacatggtgcgggtggacgtgttctgcaaggtggacaagaagggcaagaaccagtacttcatcgtgcccatctacgcctggcaggtggccgagaacatcctgcccgacatcgactgcaagggctaccggatcgacgactcctacaccttctgcttctccctgcacaagtacgacctgatcgccttccagaaggacgagaagtccaaggtggagttcgcctactacatcaactgcgactcctccaacggccggttctacctggcctggcacgacaagggctccaaggagcagcagttccggatctccacccagaacctggtgctgatccagaagtaccaggtgaacgagctgggcaaggagatccggccctgccggctgaagaagcggccccccgtgcggtccggaaagcggaccgccgacggctccgagttcgagtcccccaagaagaagcggaaggtggagtagctagcaccagcctcaagaacacccgaatggagtctctaagctacataataccaacttacactttacaaaatgttgtcccccaaaatgtagccattcgtatctgctcctaataaaaagaaagtttcttcacattctctcgagaaaaaaaaaaaatggaaaaaaaaaaaacggaaaaaaaaaaaaggtaaaaaaaaaaaatataaaaaaaaaaaacataaaaaaaaaaaacgaaaaaaaaaaaacgtaaaaaaaaaaaactcaaaaaaaaaaaagataaaaaaaaaaaacctaaaaaaaaaaaatgtaaaaaaaaaaaagggaaaaaaaaaaaacgcaaaaaaaaaaaacacaaaaaaaaaaaatgcaaaaaaaaaaaatcgaaaaaaaaaaaatctaaaaaaaaaaaacgaaaaaaaaaaaacccaaaaaaaaaaaagacaaaaaaaaaaaatagaaaaaaaaaaagttaaaaaaaaaaaactgaaaaaaaaaaaatttaaaaaaaaaaaatctag

SEQ ID NO: 2 - RNA, 7659 nt, synthetic construct
  misc_feature 1..7659: note = Synthetic: Cas9-Cas9 fusion(mRNA A)-ORF sequence
  source 1..7659: mol_type = other RNA
atggacaagaagtactccatcggcctggacatcggcaccaactccgtgggctgggccgtgatcaccgacgagtacaaggtgccctccaagaagttcaaggtgctgggcaacaccgaccggcactccatcaagaagaacctgatcggcgccctgctgttcgactccggcgagaccgccgaggccacccggctgaagcggaccgcccggcggcggtacacccggcggaagaaccggatctgctacctgcaggagatcttctccaacgagatggccaaggtggacgactccttcttccaccggctggaggagtccttcctggtggaggaggacaagaagcacgagcggcaccccatcttcggcaacatcgtggacgaggtggcctaccacgagaagtaccccaccatctaccacctgcggaagaagctggtggactccaccgacaaggccgacctgcggctgatctacctggccctggcccacatgatcaagttccggggccacttcctgatcgagggcgacctgaaccccgacaactccgacgtggacaagctgttcatccagctggtgcagacctacaaccagctgttcgaggagaaccccatcaacgcctccggcgtggacgccaaggccatcctgtccgcccggctgtccaagtcccggcggctggagaacctgatcgcccagctgcccggcgagaagaagaacggcctgttcggcaacctgatcgccctgtccctgggcctgacccccaacttcaagtccaacttcgacctggccgaggacgccaagctgcagctgtccaaggacacctacgacgacgacctggacaacctgctggcccagatcggcgaccagtacgccgacctgttcctggccgccaagaacctgtccgacgccatcctgctgtccgacatcctgcgggtgaacaccgagatcaccaaggcccccctgtccgcctccatgatcaagcggtacgacgagcaccaccaggacctgaccctgctgaaggccctggtgcggcagcagctgcccgagaagtacaaggagatcttcttcgaccagtccaagaacggctacgccggctacatcgacggcggcgcctcccaggaggagttctacaagttcatcaagcccatcctggagaagatggacggcaccgaggagctgctggtgaagctgaaccgggaggacctgctgcggaagcagcggaccttcgacaacggctccatcccccaccagatccacctgggcgagctgcacgccatcctgcggcggcaggaggacttctaccccttcctgaaggacaaccgggagaagatcgagaagatcctgaccttccggatcccctactacgtgggccccctggcccggggcaactcccggttcgcctggatgacccggaagtccgaggagaccatcaccccctggaacttcgaggaggtggtggacaagggcgcctccgcccagtccttcatcgagcggatgaccaacttcgacaagaacctgcccaacgagaaggtgctgcccaagcactccctgctgtacgagtacttcaccgtgtacaacgagctgaccaaggtgaagtacgtgaccgagggcatgcggaagcccgccttcctgtccggcgagcagaagaaggccatcgtggacctgctgttcaagaccaaccggaaggtgaccgtgaagcagctgaaggaggactacttcaagaagatcgagtgcttcgactccgtggagatctccggcgtggaggaccggttcaacgcctccctgggcacctaccacgacctgctgaagatcatcaaggacaaggacttcctggacaacgaggagaacgaggacatcctggaggacatcgtgctgaccctgaccctgttcgaggaccgggagatgatcgaggagcggctgaagacctacgcccacctgttcgacgacaaggtgatgaagcagctgaagcggcggcggtacaccggctggggccggctgtcccggaagctgatcaacggcatccgggacaagcagtccggcaagaccatcctggacttcctgaagtccgacggcttcgccaaccggaacttcatgcagctgatccacgacgactccctgaccttcaaggaggacatccagaaggcccaggtgtccggccagggcgactccctgcacgagcacatcgccaacctggccggctcccccgccatcaagaagggcatcctgcagaccgtgaaggtggtggacgagctggtgaaggtgatgggccggcacaagcccgagaacatcgtgatcgagatggcccgggagaaccagaccacccagaagggccagaagaactcccgggagcggatgaagcggatcgaggagggcatcaaggagctgggctcccagatcctgaaggagcaccccgtggagaacacccagctgcagaacgagaagctgtacctgtactacctgcagaacggccgggacatgtacgtggaccaggagctggacatcaaccggctgtccgactacgacgtggaccacatcgtgccccagtccttcctgaaggacgactccatcgacaacaaggtgctgacccggtccgacaagaaccggggcaagtccgacaacgtgccctccgaggaggtggtgaagaagatgaagaactactggcggcagctgctgaacgccaagctgatcacccagcggaagttcgacaacctgaccaaggccgagcggggcggcctgtccgagctggacaaggccggcttcatcaagcggcagctggtggagacccggcagatcaccaagcacgtggcccagatcctggactcccggatgaacaccaagtacgacgagaacgacaagctgatccgggaggtgaaggtgatcaccctgaagtccaagctggtgtccgacttccggaaggacttccagttctacaaggtgcgggagatcaacaactaccaccacgcccacgacgcctacctgaacgccgtggtgggcaccgccctgatcaagaagtaccccaagctggagtccgagttcgtgtacggcgactacaaggtgtacgacgtgcggaagatgatcgccaagtccgagcaggagatcggcaaggccaccgccaagtacttcttctactccaacatcatgaacttcttcaagaccgagatcaccctggccaacggcgagatccggaagcggcccctgatcgagaccaacggcgagaccggcgagatcgtgtgggacaagggccgggacttcgccaccgtgcggaaggtgctgtccatgccccaggtgaacatcgtgaagaagaccgaggtgcagaccggcggcttctccaaggagtccatcctgcccaagcggaactccgacaagctgatcgcccggaagaaggactgggaccccaagaagtacggcggcttcgactcccccaccgtggcctactccgtgctggtggtggccaaggtggagaagggcaagtccaagaagctgaagtccgtgaaggagctgctgggcatcaccatcatggagcggtcctccttcgagaagaaccccatcgacttcctggaggccaagggctacaaggaggtgaagaaggacctgatcatcaagctgcccaagtactccctgttcgagctggagaacggccggaagcggatgctggcctccgccggcgagctgcagaagggcaacgagctggccctgccctccaagtacgtgaacttcctgtacctggcctcccactacgagaagctgaagggctcccccgaggacaacgagcagaagcagctgttcgtggagcagcacaagcactacctggacgagatcatcgagcagatctccgagttctccaagcgggtgatcctggccgacgccaacctggacaaggtgctgtccgcctacaacaagcaccgggacaagcccatccgggagcaggccgagaacatcatccacctgttcaccctgaccaacctgggcgcccccgccgccttcaagtacttcgacaccaccatcgacaagaagcggtacacctccaccaaggaggtgctggacgccaccctgatccaccagtccatcaccggcctgtacgagacccggatcgacctgtcccagctgggcggcgacggcgcccccgagtccgccaccgagtccggcggcacctccaccgagtccgagggctccgccggcacctccaccgagtccgagggctccgccggctccgccggctccacctccaccgaggagggcacctccaccgagtccgagggctccgccggcacctccaccgagtccgagggctccgccggcacctccgagtccgccaccgagtccggcggcacctccaccgagtccgagggctcctcctccggtgccgccttcaagcccaaccccatcaactacatcctgggcctggacatcggcatcgcctccgtgggctgggccatggtggagatcgacgaggaggagaaccccatccggctgatcgacctgggcgtgcgggtgttcgagcgggccgaggtgcccaagaccggcgactccctggccatggcccggcggctggcccggtccgtgcggcggctgacccggcggcgggcccaccggctgctgcgggcccggcggctgctgaagcgggagggcgtgctgcaggccgccgacttcgacgagaacggcctgatcaagtccctgcccaacaccccctggcagctgcgggccgccgccctggaccggaagctgacccccctggagtggtccgccgtgctgctgcacctgatcaagcaccggggctacctgtcccagcggaagaacgagggcgagaccgccgacaaggagctgggcgccctgctgaagggcgtggccaacaacgcccacgccctgcagaccggcgacttccggacccccgccgagctggccctgaacaagttcgagaaggagtccggccacatccggaaccagcggggcgactactcccacaccttctcccggaaggacctgcaggccgagctgatcctgctgttcgagaagcagaaggagttcggcaacccccacgtgtccggcggcctgaaggagggcatcgagaccctgctgatgacccagcggcccgccctgtccggcgacgccgtgcagaagatgctgggccactgcaccttcgagcccgccgagcccaaggccgccaagaacacctacaccgccgagcggttcatctggctgaccaagctgaacaacctgcggatcctggagcagggctccgagcggcccctgaccgacaccgagcgggccaccctgatggacgagccctaccggaagtccaagctgacctacgcccaggcccggaagctgctgggcctggaggacaccgccttcttcaagggcctgcggtacggcaaggacaacgccgaggcctccaccctgatggagatgaaggcctaccacgccatctcccgggccctggagaaggagggcctgaaggacaagaagtcccccctgaacctgtcctccgagctgcaggacgagatcggcaccgccttctccctgttcaagaccgacgaggacatcaccggccggctgaaggaccgggtgcagcccgagatcctggaggccctgctgaagcacatctccttcgacaagttcgtgcagatctccctgaaggccctgcggcggatcgtgcccctgatggagcagggcaagcggtacgacgaggcctgcgccgagatctacggcgaccactacggcaagaagaacaccgaggagaagatctacctgccccccatccccgccgacgagatccggaaccccgtggtgctgcgggccctgtcccaggcccggaaggtgatcaacggcgtggtgcggcggtacggctcccccgcccggatccacatcgagaccgcccgggaggtgggcaagtccttcaaggaccggaaggagatcgagaagcggcaggaggagaaccggaaggaccgggagaaggccgccgccaagttccgggagtacttccccaacttcgtgggcgagcccaagtccaaggacatcctgaagctgcggctgtacgagcagcagcacggcaagtgcctgtactccggcaaggagatcaacctggtgcggctgaacgagaagggctacgtggagatcgaccacgccctgcccttctcccggacctgggacgactccttcaacaacaaggtgctggtgctgggctccgagaaccagaacaagggcaaccagaccccctacgagtacttcaacggcaaggacaactcccgggagtggcaggagttcaaggcccgggtggagacctcccggttcccccggtccaagaagcagcggatcctgctgcagaagttcgacgaggacggcttcaaggagtgcaacctgaacgacacccggtacgtgaaccgcttcctgtgccagttcgtggccgaccacatcctgctgaccggcaagggcaagcggcgggtgttcgcctccaacggccagatcaccaacctgctgcggggcttctggggcctgcggaaggtgcgggccgagaacgaccggcaccacgccctggacgccgtggtggtggcctgctccaccgtggccatgcagcagaagatcacccggttcgtgcggtacaaggagatgaacgccttcgacggcaagaccatcgacaaggagaccggcaaggtgctgcaccagaagacccacttcccccagccctgggagttcttcgcccaggaggtgatgatccgggtgttcggcaagcccgacggcaagcccgagttcgaggaggccgacacccccgagaagctgcggaccctgctggccgagaagctgtcctcccggcccgaggccgtgcacgagtacgtgacccccctgttcgtgtcccgggcccccaaccggaagatgtccggcgcccacaaggacaccctgcggtccgccaagcggttcgtgaagcacaacgagaagatctccgtgaagcgggtgtggctgaccgagatcaagctggccgacctggagaacatggtgaactacaagaacggccgggagatcgagctgtacgaggccctgaaggcccggctggaggcctacggcggcaacgccaagcaggccttcgaccccaaggacaaccccttctacaagaagggcggccagctggtgaaggccgtgcgggtggagaagacccaggagtccggcgtgctgctgaacaagaagaacgcctacaccatcgccgacaacggcgacatggtgcgggtggacgtgttctgcaaggtggacaagaagggcaagaaccagtacttcatcgtgcccatctacgcctggcaggtggccgagaacatcctgcccgacatcgactgcaagggctaccggatcgacgactcctacaccttctgcttctccctgcacaagtacgacctgatcgccttccagaaggacgagaagtccaaggtggagttcgcctactacatcaactgcgactcctccaacggccggttctacctggcctggcacgacaagggctccaaggagcagcagttccggatctccacccagaacctggtgctgatccagaagtaccaggtgaacgagctgggcaaggagatccggccctgccggctgaagaagcggccccccgtgcggtccggaaagcggaccgccgacggctccgagttcgagtcccccaagaagaagcggaaggtggagtag

SEQ ID NO: 3 - protein, 2552 aa, synthetic construct
  REGION 1..2552: note = Synthetic: Cas9-Cas9 fusion(mRNA A)-amino acid sequence
MDKKYSIGLDIGTNSVGWAVITDEYKVPSKKFKVLGNTDRHSIKKNLIGALLFDSGETAEATRLKRTARRRYTRRKNRICYLQEIFSNEMAKVDDSFFHRLEESFLVEEDKKHERHPIFGNIVDEVAYHEKYPTIYHLRKKLVDSTDKADLRLIYLALAHMIKFRGHFLIEGDLNPDNSDVDKLFIQLVQTYNQLFEENPINASGVDAKAILSARLSKSRRLENLIAQLPGEKKNGLFGNLIALSLGLTPNFKSNFDLAEDAKLQLSKDTYDDDLDNLLAQIGDQYADLFLAAKNLSDAILLSDILRVNTEITKAPLSASMIKRYDEHHQDLTLLKALVRQQLPEKYKEIFFDQSKNGYAGYIDGGASQEEFYKFIKPILEKMDGTEELLVKLNREDLLRKQRTFDNGSIPHQIHLGELHAILRRQEDFYPFLKDNREKIEKILTFRIPYYVGPLARGNSRFAWMTRKSEETITPWNFEEVVDKGASAQSFIERMTNFDKNLPNEKVLPKHSLLYEYFTVYNELTKVKYVTEGMRKPAFLSGEQKKAIVDLLFKTNRKVTVKQLKEDYFKKIECFDSVEISGVEDRFNASLGTYHDLLKIIKDKDFLDNEENEDILEDIVLTLTLFEDREMIEERLKTYAHLFDDKVMKQLKRRRYTGWGRLSRKLINGIRDKQSGKTILDFLKSDGFANRNFMQLIHDDSLTFKEDIQKAQVSGQGDSLHEHIANLAGSPAIKKGILQTVKVVDELVKVMGRHKPENIVIEMARENQTTQKGQKNSRERMKRIEEGIKELGSQILKEHPVENTQLQNEKLYLYYLQNGRDMYVDQELDINRLSDYDVDHIVPQSFLKDDSIDNKVLTRSDKNRGKSDNVPSEEVVKKMKNYWRQLLNAKLITQRKFDNLTKAERGGLSELDKAGFIKRQLVETRQITKHVAQILDSRMNTKYDENDKLIREVKVITLKSKLVSDFRKDFQFYKVREINNYHHAHDAYLNAVVGTALIKKYPKLESEFVYGDYKVYDVRKMIAKSEQEIGKATAKYFFYSNIMNFFKTEITLANGEIRKRPLIETNGETGEIVWDKGRDFATVRKVLSMPQVNIVKKTEVQTGGFSKESILPKRNSDKLIARKKDWDPKKYGGFDSPTVAYSVLVVAKVEKGKSKKLKSVKELLGITIMERSSFEKNPIDFLEAKGYKEVKKDLIIKLPKYSLFELENGRKRMLASAGELQKGNELALPSKYVNFLYLASHYEKLKGSPEDNEQKQLFVEQHKHYLDEIIEQISEFSKRVILADANLDKVLSAYNKHRDKPIREQAENIIHLFTLTNLGAPAAFKYFDTTIDKKRYTSTKEVLDATLIHQSITGLYETRIDLSQLGGDGAPESATESGGTSTESEGSAGTSTESEGSAGSAGSTSTEEGTSTESEGSAGTSTESEGSAGTSESATESGGTSTESEGSSSGAAFKPNPINYILGLDIGIASVGWAMVEIDEEENPIRLIDLGVRVFERAEVPKTGDSLAMARRLARSVRRLTRRRAHRLLRARRLLKREGVLQAADFDENGLIKSLPNTPWQLRAAALDRKLTPLEWSAVLLHLIKHRGYLSQRKNEGETADKELGALLKGVANNAHALQTGDFRTPAELALNKFEKESGHIRNQRGDYSHTFSRKDLQAELILLFEKQKEFGNPHVSGGLKEGIETLLMTQRPALSGDAVQKMLGHCTFEPAEPKAAKNTYTAERFIWLTKLNNLRILEQGSERPLTDTERATLMDEPYRKSKLTYAQARKLLGLEDTAFFKGLRYGKDNAEASTLMEMKAYHAISRALEKEGLKDKKSPLNLSSELQDEIGTAFSLFKTDEDITGRLKDRVQPEILEALLKHISFDKFVQISLKALRRIVPLMEQGKRYDEACAEIYGDHYGKKNTEEKIYLPPIPADEIRNPVVLRALSQARKVINGVVRRYGSPARIHIETAREVGKSFKDRKEIEKRQEENRKDREKAAAKFREYFPNFVGEPKSKDILKLRLYEQQHGKCLYSGKEINLVRLNEKGYVEIDHALPFSRTWDDSFNNKVLVLGSENQNKGNQTPYEYFNGKDNSREWQEFKARVETSRFPRSKKQRILLQKFDEDGFKECNLNDTRYVNRFLCQFVADHILLTGKGKRRVFASNGQITNLLRGFWGLRKVRAENDRHHALDAVVVACSTVAMQQKITRFVRYKEMNAFDGKTIDKETGKVLHQKTHFPQPWEFFAQEVMIRVFGKPDGKPEFEEADTPEKLRTLLAEKLSSRPEAVHEYVTPLFVSRAPNRKMSGAHKDTLRSAKRFVKHNEKISVKRVWLTEIKLADLENMVNYKNGREIELYEALKARLEAYGGNAKQAFDPKDNPFYKKGGQLVKAVRVEKTQESGVLLNKKNAYTIADNGDMVRVDVFCKVDKKGKNQYFIVPIYAWQVAENILPDIDCKGYRIDDSYTFCFSLHKYDLIAFQKDEKSKVEFAYYINCDSSNGRFYLAWHDKGSKEQQFRISTQNLVLIQKYQVNELGKEIRPCRLKKRPPVRSGKRTADGSEFESPKKKRKVE

SEQ ID NO: 4 - RNA, 7716 nt, synthetic construct
  misc_feature 1..7716: note = Synthetic: Cas9-Cas9 fusion(mRNA A with HiBit tag)-ORF sequence
  source 1..7716: mol_type = other RNA
atggacaagaagtactccatcggcctggacatcggcaccaactccgtgggctgggccgtgatcaccgacgagtacaaggtgccctccaagaagttcaaggtgctgggcaacaccgaccggcactccatcaagaagaacctgatcggcgccctgctgttcgactccggcgagaccgccgaggccacccggctgaagcggaccgcccggcggcggtacacccggcggaagaaccggatctgctacctgcaggagatcttctccaacgagatggccaaggtggacgactccttcttccaccggctggaggagtccttcctggtggaggaggacaagaagcacgagcggcaccccatcttcggcaacatcgtggacgaggtggcctaccacgagaagtaccccaccatctaccacctgcggaagaagctggtggactccaccgacaaggccgacctgcggctgatctacctggccctggcccacatgatcaagttccggggccacttcctgatcgagggcgacctgaaccccgacaactccgacgtggacaagctgttcatccagctggtgcagacctacaaccagctgttcgaggagaaccccatcaacgcctccggcgtggacgccaaggccatcctgtccgcccggctgtccaagtcccggcggctggagaacctgatcgcccagctgcccggcgagaagaagaacggcctgttcggcaacctgatcgccctgtccctgggcctgacccccaacttcaagtccaacttcgacctggccgaggacgccaagctgcagctgtccaaggacacctacgacgacgacctggacaacctgctggcccagatcggcgaccagtacgccgacctgttcctggccgccaagaacctgtccgacgccatcctgctgtccgacatcctgcgggtgaacaccgagatcaccaaggcccccctgtccgcctccatgatcaagcggtacgacgagcaccaccaggacctgaccctgctgaaggccctggtgcggcagcagctgcccgagaagtacaaggagatcttcttcgaccagtccaagaacggctacgccggctacatcgacggcggcgcctcccaggaggagttctacaagttcatcaagcccatcctggagaagatggacggcaccgaggagctgctggtgaagctgaaccgggaggacctgctgcggaagcagcggaccttcgacaacggctccatcccccaccagatccacctgggcgagctgcacgccatcctgcggcggcaggaggacttctaccccttcctgaaggacaaccgggagaagatcgagaagatcctgaccttccggatcccctactacgtgggccccctggcccggggcaactcccggttcgcctggatgacccggaagtccgaggagaccatcaccccctggaacttcgaggaggtggtggacaagggcgcctccgcccagtccttcatcgagcggatgaccaacttcgacaagaacctgcccaacgagaaggtgctgcccaagcactccctgctgtacgagtacttcaccgtgtacaacgagctgaccaaggtgaagtacgtgaccgagggcatgcggaagcccgccttcctgtccggcgagcagaagaaggccatcgtggacctgctgttcaagaccaaccggaaggtgaccgtgaagcagctgaaggaggactacttcaagaagatcgagtgcttcgactccgtggagatctccggcgtggaggaccggttcaacgcctccctgggcacctaccacgacctgctgaagatcatcaaggacaaggacttcctggacaacgaggagaacgaggacatcctggaggacatcgtgctgaccctgaccctgttcgaggaccgggagatgatcgaggagcggctgaagacctacgcccacctgttcgacgacaaggtgatgaagcagctgaagcggcggcggtacaccggctggggccggctgtcccggaagctgatcaacggcatccgggacaagcagtccggcaagaccatcctggacttcctgaagtccgacggcttcgccaaccggaacttcatgcagctgatccacgacgactccctgaccttcaaggaggacatccagaaggcccaggtgtccggccagggcgactccctgcacgagcacatcgccaacctggccggctcccccgccatcaagaagggcatcctgcagaccgtgaaggtggtggacgagctggtgaaggtgatgggccggcacaagcccgagaacatcgtgatcgagatggcccgggagaaccagaccacccagaagggccagaagaactcccgggagcggatgaagcggatcgaggagggcatcaaggagctgggctcccagatcctgaaggagcaccccgtggagaacacccagctgcagaacgagaagctgtacctgtactacctgcagaacggccgggacatgtacgtggaccaggagctggacatcaaccggctgtccgactacgacgtggaccacatcgtgccccagtccttcctgaaggacgactccatcgacaacaaggtgctgacccggtccgacaagaaccggggcaagtccgacaacgtgccctccgaggaggtggtgaagaagatgaagaactactggcggcagctgctgaacgccaagctgatcacccagcggaagttcgacaacctgaccaaggccgagcggggcggcctgtccgagctggacaaggccggcttcatcaagcggcagctggtggagacccggcagatcaccaagcacgtggcccagatcctggactcccggatgaacaccaagtacgacgagaacgacaagctgatccgggaggtgaaggtgatcaccctgaagtccaagctggtgtccgacttccggaaggacttccagttctacaaggtgcgggagatcaacaactaccaccacgcccacgacgcctacctgaacgccgtggtgggcaccgccctgatcaagaagtaccccaagctggagtccgagttcgtgtacggcgactacaaggtgtacgacgtgcggaagatgatcgccaagtccgagcaggagatcggcaaggccaccgccaagtacttcttctactccaacatcatgaacttcttcaagaccgagatcaccctggccaacggcgagatccggaagcggcccctgatcgagaccaacggcgagaccggcgagatcgtgtgggacaagggccgggacttcgccaccgtgcggaaggtgctgtccatgccccaggtgaacatcgtgaagaagaccgaggtgcagaccggcggcttctccaaggagtccatcctgcccaagcggaactccgacaagctgatcgcccggaagaaggactgggaccccaagaagtacggcggcttcgactcccccaccgtggcctactccgtgctggtggtggccaaggtggagaagggcaagtccaagaagctgaagtccgtgaaggagctgctgggcatcaccatcatggagcggtcctccttcgagaagaaccccatcgacttcctggaggccaagggctacaaggaggtgaagaaggacctgatcatcaagctgcccaagtactccctgttcgagctggagaacggccggaagcggatgctggcctccgccggcgagctgcagaagggcaacgagctggccctgccctccaagtacgtgaacttcctgtacctggcctcccactacgagaagctgaagggctcccccgaggacaacgagcagaagcagctgttcgtggagcagcacaagcactacctggacgagatcatcgagcagatctccgagttctccaagcgggtgatcctggccgacgccaacctggacaaggtgctgtccgcctacaacaagcaccgggacaagcccatccgggagcaggccgagaacatcatccacctgttcaccctgaccaacctgggcgcccccgccgccttcaagtacttcgacaccaccatcgacaagaagcggtacacctccaccaaggaggtgctggacgccaccctgatccaccagtccatcaccggcctgtacgagacccggatcgacctgtcccagctgggcggcgacggcgcccccgagtccgccaccgagtccggcggcacctccaccgagtccgagggctccgccggcacctccaccgagtccgagggctccgccggctccgccggctccacctccaccgaggagggcacctccaccgagtccgagggctccgccggcacctccaccgagtccgagggctccgccggcacctccgagtccgccaccgagtccggcggcacctccaccgagtccgagggctcctcctccggtgccgccttcaagcccaaccccatcaactacatcctgggcctggacatcggcatcgcctccgtgggctgggccatggtggagatcgacgaggaggagaaccccatccggctgatcgacctgggcgtgcgggtgttcgagcgggccgaggtgcccaagaccggcgactccctggccatggcccggcggctggcccggtccgtgcggcggctgacccggcggcgggcccaccggctgctgcgggcccggcggctgctgaagcgggagggcgtgctgcaggccgccgacttcgacgagaacggcctgatcaagtccctgcccaacaccccctggcagctgcgggccgccgccctggaccggaagctgacccccctggagtggtccgccgtgctgctgcacctgatcaagcaccggggctacctgtcccagcggaagaacgagggcgagaccgccgacaaggagctgggcgccctgctgaagggcgtggccaacaacgcccacgccctgcagaccggcgacttccggacccccgccgagctggccctgaacaagttcgagaaggagtccggccacatccggaaccagcggggcgactactcccacaccttctcccggaaggacctgcaggccgagctgatcctgctgttcgagaagcagaaggagttcggcaacccccacgtgtccggcggcctgaaggagggcatcgagaccctgctgatgacccagcggcccgccctgtccggcgacgccgtgcagaagatgctgggccactgcaccttcgagcccgccgagcccaaggccgccaagaacacctacaccgccgagcggttcatctggctgaccaagctgaacaacctgcggatcctggagcagggctccgagcggcccctgaccgacaccgagcgggccaccctgatggacgagccctaccggaagtccaagctgacctacgcccaggcccggaagctgctgggcctggaggacaccgccttcttcaagggcctgcggtacggcaaggacaacgccgaggcctccaccctgatggagatgaaggcctaccacgccatctcccgggccctggagaaggagggcctgaaggacaagaagtcccccctgaacctgtcctccgagctgcaggacgagatcggcaccgccttctccctgttcaagaccgacgaggacatcaccggccggctgaaggaccgggtgcagcccgagatcctggaggccctgctgaagcacatctccttcgacaagttcgtgcagatctccctgaaggccctgcggcggatcgtgcccctgatggagcagggcaagcggtacgacgaggcctgcgccgagatctacggcgaccactacggcaagaagaacaccgaggagaagatctacctgccccccatccccgccgacgagatccggaaccccgtggtgctgcgggccctgtcccaggcccggaaggtgatcaacggcgtggtgcggcggtacggctcccccgcccggatccacatcgagaccgcccgggaggtgggcaagtccttcaaggaccggaaggagatcgagaagcggcaggaggagaaccggaaggaccgggagaaggccgccgccaagttccgggagtacttccccaacttcgtgggcgagcccaagtccaaggacatcctgaagctgcggctgtacgagcagcagcacggcaagtgcctgtactccggcaaggagatcaacctggtgcggctgaacgagaagggctacgtggagatcgaccacgccctgcccttctcccggacctgggacgactccttcaacaacaaggtgctggtgctgggctccgagaaccagaacaagggcaaccagaccccctacgagtacttcaacggcaaggacaactcccgggagtggcaggagttcaaggcccgggtggagacctcccggttcccccggtccaagaagcagcggatcctgctgcagaagttcgacgaggacggcttcaaggagtgcaacctgaacgacacccggtacgtgaaccgcttcctgtgccagttcgtggccgaccacatcctgctgaccggcaagggcaagcggcgggtgttcgcctccaacggccagatcaccaacctgctgcggggcttctggggcctgcggaaggtgcgggccgagaacgaccggcaccacgccctggacgccgtggtggtggcctgctccaccgtggccatgcagcagaagatcacccggttcgtgcggtacaaggagatgaacgccttcgacggcaagaccatcgacaaggagaccggcaaggtgctgcaccagaagacccacttcccccagccctgggagttcttcgcccaggaggtgatgatccgggtgttcggcaagcccgacggcaagcccgagttcgaggaggccgacacccccgagaagctgcggaccctgctggccgagaagctgtcctcccggcccgaggccgtgcacgagtacgtgacccccctgttcgtgtcccgggcccccaaccggaagatgtccggcgcccacaaggacaccctgcggtccgccaagcggttcgtgaagcacaacgagaagatctccgtgaagcgggtgtggctgaccgagatcaagctggccgacctggagaacatggtgaactacaagaacggccgggagatcgagctgtacgaggccctgaaggcccggctggaggcctacggcggcaacgccaagcaggccttcgaccccaaggacaaccccttctacaagaagggcggccagctggtgaaggccgtgcgggtggagaagacccaggagtccggcgtgctgctgaacaagaagaacgcctacaccatcgccgacaacggcgacatggtgcgggtggacgtgttctgcaaggtggacaagaagggcaagaaccagtacttcatcgtgcccatctacgcctggcaggtggccgagaacatcctgcccgacatcgactgcaagggctaccggatcgacgactcctacaccttctgcttctccctgcacaagtacgacctgatcgccttccagaaggacgagaagtccaaggtggagttcgcctactacatcaactgcgactcctccaacggccggttctacctggcctggcacgacaagggctccaaggagcagcagttccggatctccacccagaacctggtgctgatccagaagtaccaggtgaacgagctgggcaaggagatccggccctgccggctgaagaagcggccccccgtgcggtccggaaagcggaccgccgacggctccgagttcgagtcccccaagaagaagcggaaggtggagagcgaaagcgcaacaccggaaagcgtcagcggatggagactgttcaagaagatcagctag

SEQ ID NO: 5 - protein, 2571 aa, synthetic construct
  REGION 1..2571: note = Synthetic: Cas9-Cas9 fusion(mRNA A with HiBit tag)-amino acid sequence
MDKKYSIGLDIGTNSVGWAVITDEYKVPSKKFKVLGNTDRHSIKKNLIGALLFDSGETAEATRLKRTARRRYTRRKNRICYLQEIFSNEMAKVDDSFFHRLEESFLVEEDKKHERHPIFGNIVDEVAYHEKYPTIYHLRKKLVDSTDKADLRLIYLALAHMIKFRGHFLIEGDLNPDNSDVDKLFIQLVQTYNQLFEENPINASGVDAKAILSARLSKSRRLENLIAQLPGEKKNGLFGNLIALSLGLTPNFKSNFDLAEDAKLQLSKDTYDDDLDNLLAQIGDQYADLFLAAKNLSDAILLSDILRVNTEITKAPLSASMIKRYDEHHQDLTLLKALVRQQLPEKYKEIFFDQSKNGYAGYIDGGASQEEFYKFIKPILEKMDGTEELLVKLNREDLLRKQRTFDNGSIPHQIHLGELHAILRRQEDFYPFLKDNREKIEKILTFRIPYYVGPLARGNSRFAWMTRKSEETITPWNFEEVVDKGASAQSFIERMTNFDKNLPNEKVLPKHSLLYEYFTVYNELTKVKYVTEGMRKPAFLSGEQKKAIVDLLFKTNRKVTVKQLKEDYFKKIECFDSVEISGVEDRFNASLGTYHDLLKIIKDKDFLDNEENEDILEDIVLTLTLFEDREMIEERLKTYAHLFDDKVMKQLKRRRYTGWGRLSRKLINGIRDKQSGKTILDFLKSDGFANRNFMQLIHDDSLTFKEDIQKAQVSGQGDSLHEHIANLAGSPAIKKGILQTVKVVDELVKVMGRHKPENIVIEMARENQTTQKGQKNSRERMKRIEEGIKELGSQILKEHPVENTQLQNEKLYLYYLQNGRDMYVDQELDINRLSDYDVDHIVPQSFLKDDSIDNKVLTRSDKNRGKSDNVPSEEVVKKMKNYWRQLLNAKLITQRKFDNLTKAERGGLSELDKAGFIKRQLVETRQITKHVAQILDSRMNTKYDENDKLIREVKVITLKSKLVSDFRKDFQFYKVREINNYHHAHDAYLNAVVGTALIKKYPKLESEFVYGDYKVYDVRKMIAKSEQEIGKATAKYFFYSNIMNFFKTEITLANGEIRKRPLIETNGETGEIVWDKGRDFATVRKVLSMPQVNIVKKTEVQTGGFSKESILPKRNSDKLIARKKDWDPKKYGGFDSPTVAYSVLVVAKVEKGKSKKLKSVKELLGITIMERSSFEKNPIDFLEAKGYKEVKKDLIIKLPKYSLFELENGRKRMLASAGELQKGNELALPSKYVNFLYLASHYEKLKGSPEDNEQKQLFVEQHKHYLDEIIEQISEFSKRVILADANLDKVLSAYNKHRDKPIREQAENIIHLFTLTNLGAPAAFKYFDTTIDKKRYTSTKEVLDATLIHQSITGLYETRIDLSQLGGDGAPESATESGGTSTESEGSAGTSTESEGSAGSAGSTSTEEGTSTESEGSAGTSTESEGSAGTSESATESGGTSTESEGSSSGAAFKPNPINYILGLDIGIASVGWAMVEIDEEENPIRLIDLGVRVFERAEVPKTGDSLAMARRLARSVRRLTRRRAHRLLRARRLLKREGVLQAADFDENGLIKSLPNTPWQLRAAALDRKLTPLEWSAVLLHLIKHRGYLSQRKNEGETADKELGALLKGVANNAHALQTGDFRTPAELALNKFEKESGHIRNQRGDYSHTFSRKDLQAELILLFEKQKEFGNPHVSGGLKEGIETLLMTQRPALSGDAVQKMLGHCTFEPAEPKAAKNTYTAERFIWLTKLNNLRILEQGSERPLTDTERATLMDEPYRKSKLTYAQARKLLGLEDTAFFKGLRYGKDNAEASTLMEMKAYHAISRALEKEGLKDKKSPLNLSSELQDEIGTAFSLFKTDEDITGRLKDRVQPEILEALLKHISFDKFVQISLKALRRIVPLMEQGKRYDEACAEIYGDHYGKKNTEEKIYLPPIPADEIRNPVVLRALSQARKVINGVVRRYGSPARIHIETAREVGKSFKDRKEIEKRQEENRKDREKAAAKFREYFPNFVGEPKSKDILKLRLYEQQHGKCLYSGKEINLVRLNEKGYVEIDHALPFSRTWDDSFNNKVLVLGSENQNKGNQTPYEYFNGKDNSREWQEFKARVETSRFPRSKKQRILLQKFDEDGFKECNLNDTRYVNRFLCQFVADHILLTGKGKRRVFASNGQITNLLRGFWGLRKVRAENDRHHALDAVVVACSTVAMQQKITRFVRYKEMNAFDGKTIDKETGKVLHQKTHFPQPWEFFAQEVMIRVFGKPDGKPEFEEADTPEKLRTLLAEKLSSRPEAVHEYVTPLFVSRAPNRKMSGAHKDTLRSAKRFVKHNEKISVKRVWLTEIKLADLENMVNYKNGREIELYEALKARLEAYGGNAKQAFDPKDNPFYKKGGQLVKAVRVEKTQESGVLLNKKNAYTIADNGDMVRVDVFCKVDKKGKNQYFIVPIYAWQVAENILPDIDCKGYRIDDSYTFCFSLHKYDLIAFQKDEKSKVEFAYYINCDSSNGRFYLAWHDKGSKEQQFRISTQNLVLIQKYQVNELGKEIRPCRLKKRPPVRSGKRTADGSEFESPKKKRKVESESATPESVSGWRLFKKIS

SEQ ID NO: 6 - RNA, 7569 nt, synthetic construct
  misc_feature 1..7569: note = Synthetic: Cas9-Cas9 fusion(mRNA B)-ORF sequence
  source 1..7569: mol_type = other RNA
atggacggctccggcggcggctcccccaagaagaagcggaaggtgggcggctccggcggcggcgccgccttcaagcccaaccccatcaactacatcctgggcctggacatcggcatcgcctccgtgggctgggccatggtggagatcgacgaggaggagaaccccatccggctgatcgacctgggcgtgcgggtgttcgagcgggccgaggtgcccaagaccggcgactccctggccatggcccggcggctggcccggtccgtgcggcggctgacccggcggcgggcccaccggctgctgcgggcccggcggctgctgaagcgggagggcgtgctgcaggccgccgacttcgacgagaacggcctgatcaagtccctgcccaacaccccctggcagctgcgggccgccgccctggaccggaagctgacccccctggagtggtccgccgtgctgctgcacctgatcaagcaccggggctacctgtcccagcggaagaacgagggcgagaccgccgacaaggagctgggcgccctgctgaagggcgtggccaacaacgcccacgccctgcagaccggcgacttccggacccccgccgagctggccctgaacaagttcgagaaggagtccggccacatccggaaccagcggggcgactactcccacaccttctcccggaaggacctgcaggccgagctgatcctgctgttcgagaagcagaaggagttcggcaacccccacgtgtccggcggcctgaaggagggcatcgagaccctgctgatgacccagcggcccgccctgtccggcgacgccgtgcagaagatgctgggccactgcaccttcgagcccgccgagcccaaggccgccaagaacacctacaccgccgagcggttcatctggctgaccaagctgaacaacctgcggatcctggagcagggctccgagcggcccctgaccgacaccgagcgggccaccctgatggacgagccctaccggaagtccaagctgacctacgcccaggcccggaagctgctgggcctggaggacaccgccttcttcaagggcctgcggtacggcaaggacaacgccgaggcctccaccctgatggagatgaaggcctaccacgccatctcccgggccctggagaaggagggcctgaaggacaagaagtcccccctgaacctgtcctccgagctgcaggacgagatcggcaccgccttctccctgttcaagaccgacgaggacatcaccggccggctgaaggaccgggtgcagcccgagatcctggaggccctgctgaagcacatctccttcgacaagttcgtgcagatctccctgaaggccctgcggcggatcgtgcccctgatggagcagggcaagcggtacgacgaggcctgcgccgagatctacggcgaccactacggcaagaagaacaccgaggagaagatctacctgccccccatccccgccgacgagatccggaaccccgtggtgctgcgggccctgtcccaggcccggaaggtgatcaacggcgtggtgcggcggtacggctcccccgcccggatccacatcgagaccgcccgggaggtgggcaagtccttcaaggaccggaaggagatcgagaagcggcaggaggagaaccggaaggaccgggagaaggccgccgccaagttccgggagtacttccccaacttcgtgggcgagcccaagtccaaggacatcctgaagctgcggctgtacgagcagcagcacggcaagtgcctgtactccggcaaggagatcaacctggtgcggctgaacgagaagggctacgtggagatcgaccacgccctgcccttctcccggacctgggacgactccttcaacaacaaggtgctggtgctgggctccgagaaccagaacaagggcaaccagaccccctacgagtacttcaacggcaaggacaactcccgggagtggcaggagttcaaggcccgggtggagacctcccggttcccccggtccaagaagcagcggatcctgctgcagaagttcgacgaggacggcttcaaggagtgcaacctgaacgacacccggtacgtgaaccggttcctgtgccagttcgtggccgaccacatcctgctgaccggcaagggcaagcggcgggtgttcgcctccaacggccagatcaccaacctgctgcggggcttctggggcctgcggaaggtgcgggccgagaacgaccggcaccacgccctggacgccgtggtggtggcctgctccaccgtggccatgcagcagaagatcacccggttcgtgcggtacaaggagatgaacgccttcgacggcaagaccatcgacaaggagaccggcaaggtgctgcaccagaagacccacttcccccagccctgggagttcttcgcccaggaggtgatgatccgggtgttcggcaagcccgacggcaagcccgagttcgaggaggccgacacccccgagaagctgcggaccctgctggccgagaagctgtcctcccggcccgaggccgtgcacgagtacgtgacccccctgttcgtgtcccgggcccccaaccggaagatgtccggcgcccacaaggacaccctgcggtccgccaagcggttcgtgaagcacaacgagaagatctccgtgaagcgggtgtggctgaccgagatcaagctggccgacctggagaacatggtgaactacaagaacggccgggagatcgagctgtacgaggccctgaaggcccggctggaggcctacggcggcaacgccaagcaggccttcgaccccaaggacaaccccttctacaagaagggcggccagctggtgaaggccgtgcgggtggagaagacccaggagtccggcgtgctgctgaacaagaagaacgcctacaccatcgccgacaacggcgacatggtgcgggtggacgtgttctgcaaggtggacaagaagggcaagaaccagtacttcatcgtgcccatctacgcctggcaggtggccgagaacatcctgcccgacatcgactgcaagggctaccggatcgacgactcctacaccttctgcttctccctgcacaagtacgacctgatcgccttccagaaggacgagaagtccaaggtggagttcgcctactacatcaactgcgactcctccaacggccggttctacctggcctggcacgacaagggctccaaggagcagcagttccggatctccacccagaacctggtgctgatccagaagtaccaggtgaacgagctgggcaaggagatccggccctgccggctgaagaagcggccccccgtgcggggcgcccccgagtccgccaccgagtccggcggcacctccaccgagtccgagggctccgccggcacctccaccgagtccgagggctccgccggctccgccggctccacctccggctcctcctccggcgacaagaagtactccatcggcctggacatcggcaccaactccgtgggctgggccgtgatcaccgacgagtacaaggtgccctccaagaagttcaaggtgctgggcaacaccgaccggcactccatcaagaagaacctgatcggcgccctgctgttcgactccggcgagaccgccgaggccacccggctgaagcggaccgcccggcggcggtacacccggcggaagaaccggatctgctacctgcaggagatcttctccaacgagatggccaaggtggacgactccttcttccaccggctggaggagtccttcctggtggaggaggacaagaagcacgagcggcaccccatcttcggcaacatcgtggacgaggtggcctaccacgagaagtaccccaccatctaccacctgcggaagaagctggtggactccaccgacaaggccgacctgcggctgatctacctggccctggcccacatgatcaagttccggggccacttcctgatcgagggcgacctgaaccccgacaactccgacgtggacaagctgttcatccagctggtgcagacctacaaccagctgttcgaggagaaccccatcaacgcctccggcgtggacgccaaggccatcctgtccgcccggctgtccaagtcccggcggctggagaacctgatcgcccagctgcccggcgagaagaagaacggcctgttcggcaacctgatcgccctgtccctgggcctgacccccaacttcaagtccaacttcgacctggccgaggacgccaagctgcagctgtccaaggacacctacgacgacgacctggacaacctgctggcccagatcggcgaccagtacgccgacctgttcctggccgccaagaacctgtccgacgccatcctgctgtccgacatcctgcgggtgaacaccgagatcaccaaggcccccctgtccgcctccatgatcaagcggtacgacgagcaccaccaggacctgaccctgctgaaggccctggtgcggcagcagctgcccgagaagtacaaggagatcttcttcgaccagtccaagaacggctacgccggctacatcgacggcggcgcctcccaggaggagttctacaagttcatcaagcccatcctggagaagatggacggcaccgaggagctgctggtgaagctgaaccgggaggacctgctgcggaagcagcggaccttcgacaacggctccatcccccaccagatccacctgggcgagctgcacgccatcctgcggcggcaggaggacttctaccccttcctgaaggacaaccgggagaagatcgagaagatcctgaccttccggatcccctactacgtgggccccctggcccggggcaactcccggttcgcctggatgacccggaagtccgaggagaccatcaccccctggaacttcgaggaggtggtggacaagggcgcctccgcccagtccttcatcgagcggatgaccaacttcgacaagaacctgcccaacgagaaggtgctgcccaagcactccctgctgtacgagtacttcaccgtgtacaacgagctgaccaaggtgaagtacgtgaccgagggcatgcggaagcccgccttcctgtccggcgagcagaagaaggccatcgtggacctgctgttcaagaccaaccggaaggtgaccgtgaagcagctgaaggaggactacttcaagaagatcgagtgcttcgactccgtggagatctccggcgtggaggaccggttcaacgcctccctgggcacctaccacgacctgctgaagatcatcaaggacaaggacttcctggacaacgaggagaacgaggacatcctggaggacatcgtgctgaccctgaccctgttcgaggaccgggagatgatcgaggagcggctgaagacctacgcccacctgttcgacgacaaggtgatgaagcagctgaagcggcggcggtacaccggctggggccggctgtcccggaagctgatcaacggcatccgggacaagcagtccggcaagaccatcctggacttcctgaagtccgacggcttcgccaaccggaacttcatgcagctgatccacgacgactccctgaccttcaaggaggacatccagaaggcccaggtgtccggccagggcgactccctgcacgagcacatcgccaacctggccggctcccccgccatcaagaagggcatcctgcagaccgtgaaggtggtggacgagctggtgaaggtgatgggccggcacaagcccgagaacatcgtgatcgagatggcccgggagaaccagaccacccagaagggccagaagaactcccgggagcggatgaagcggatcgaggagggcatcaaggagctgggctcccagatcctgaaggagcaccccgtggagaacacccagctgcagaacgagaagctgtacctgtactacctgcagaacggccgggacatgtacgtggaccaggagctggacatcaaccggctgtccgactacgacgtggaccacatcgtgccccagtccttcctgaaggacgactccatcgacaacaaggtgctgacccggtccgacaagaaccggggcaagtccgacaacgtgccctccgaggaggtggtgaagaagatgaagaactactggcggcagctgctgaacgccaagctgatcacccagcggaagttcgacaacctgaccaaggccgagcggggcggcctgtccgagctggacaaggccggcttcatcaagcggcagctggtggagacccggcagatcaccaagcacgtggcccagatcctggactcccggatgaacaccaagtacgacgagaacgacaagctgatccgggaggtgaaggtgatcaccctgaagtccaagctggtgtccgacttccggaaggacttccagttctacaaggtgcgggagatcaacaactaccaccacgcccacgacgcctacctgaacgccgtggtgggcaccgccctgatcaagaagtaccccaagctggagtccgagttcgtgtacggcgactacaaggtgtacgacgtgcggaagatgatcgccaagtccgagcaggagatcggcaaggccaccgccaagtacttcttctactccaacatcatgaacttcttcaagaccgagatcaccctggccaacggcgagatccggaagcggcccctgatcgagaccaacggcgagaccggcgagatcgtgtgggacaagggccgggacttcgccaccgtgcggaaggtgctgtccatgccccaggtgaacatcgtgaagaagaccgaggtgcagaccggcggcttctccaaggagtccatcctgcccaagcggaactccgacaagctgatcgcccggaagaaggactgggaccccaagaagtacggcggcttcgactcccccaccgtggcctactccgtgctggtggtggccaaggtggagaagggcaagtccaagaagctgaagtccgtgaaggagctgctgggcatcaccatcatggagcggtcctccttcgagaagaaccccatcgacttcctggaggccaagggctacaaggaggtgaagaaggacctgatcatcaagctgcccaagtactccctgttcgagctggagaacggccggaagcggatgctggcctccgccggcgagctgcagaagggcaacgagctggccctgccctccaagtacgtgaacttcctgtacctggcctcccactacgagaagctgaagggctcccccgaggacaacgagcagaagcagctgttcgtggagcagcacaagcactacctggacgagatcatcgagcagatctccgagttctccaagcgggtgatcctggccgacgccaacctggacaaggtgctgtccgcctacaacaagcaccgggacaagcccatccgggagcaggccgagaacatcatccacctgttcaccctgaccaacctgggcgcccccgccgccttcaagtacttcgacaccaccatcgacaagaagcggtacacctccaccaaggaggtgctggacgccaccctgatccaccagtccatcaccggcctgtacgagacccggatcgacctgtcccagctgggcggcgacggcggcggctcccccaagaagaagcggaaggtgtag

SEQ ID NO: 7 - protein, 2522 aa, synthetic construct
  REGION 1..2522: note = Synthetic: Cas9-Cas9 fusion(mRNA B)-amino acid sequence
MDGSGGGSPKKKRKVGGSGGGAAFKPNPINYILGLDIGIASVGWAMVEIDEEENPIRLIDLGVRVFERAEVPKTGDSLAMARRLARSVRRLTRRRAHRLLRARRLLKREGVLQAADFDENGLIKSLPNTPWQLRAAALDRKLTPLEWSAVLLHLIKHRGYLSQRKNEGETADKELGALLKGVANNAHALQTGDFRTPAELALNKFEKESGHIRNQRGDYSHTFSRKDLQAELILLFEKQKEFGNPHVSGGLKEGIETLLMTQRPALSGDAVQKMLGHCTFEPAEPKAAKNTYTAERFIWLTKLNNLRILEQGSERPLTDTERATLMDEPYRKSKLTYAQARKLLGLEDTAFFKGLRYGKDNAEASTLMEMKAYHAISRALEKEGLKDKKSPLNLSSELQDEIGTAFSLFKTDEDITGRLKDRVQPEILEALLKHISFDKFVQISLKALRRIVPLMEQGKRYDEACAEIYGDHYGKKNTEEKIYLPPIPADEIRNPVVLRALSQARKVINGVVRRYGSPARIHIETAREVGKSFKDRKEIEKRQEENRKDREKAAAKFREYFPNFVGEPKSKDILKLRLYEQQHGKCLYSGKEINLVRLNEKGYVEIDHALPFSRTWDDSFNNKVLVLGSENQNKGNQTPYEYFNGKDNSREWQEFKARVETSRFPRSKKQRILLQKFDEDGFKECNLNDTRYVNRFLCQFVADHILLTGKGKRRVFASNGQITNLLRGFWGLRKVRAENDRHHALDAVVVACSTVAMQQKITRFVRYKEMNAFDGKTIDKETGKVLHQKTHFPQPWEFFAQEVMIRVFGKPDGKPEFEEADTPEKLRTLLAEKLSSRPEAVHEYVTPLFVSRAPNRKMSGAHKDTLRSAKRFVKHNEKISVKRVWLTEIKLADLENMVNYKNGREIELYEALKARLEAYGGNAKQAFDPKDNPFYKKGGQLVKAVRVEKTQESGVLLNKKNAYTIADNGDMVRVDVFCKVDKKGKNQYFIVPIYAWQVAENILPDIDCKGYRIDDSYTFCFSLHKYDLIAFQKDEKSKVEFAYYINCDSSNGRFYLAWHDKGSKEQQFRISTQNLVLIQKYQVNELGKEIRPCRLKKRPPVRGAPESATESGGTSTESEGSAGTSTESEGSAGSAGSTSGSSSGDKKYSIGLDIGTNSVGWAVITDEYKVPSKKFKVLGNTDRHSIKKNLIGALLFDSGETAEATRLKRTARRRYTRRKNRICYLQEIFSNEMAKVDDSFFHRLEESFLVEEDKKHERHPIFGNIVDEVAYHEKYPTIYHLRKKLVDSTDKADLRLIYLALAHMIKFRGHFLIEGDLNPDNSDVDKLFIQLVQTYNQLFEENPINASGVDAKAILSARLSKSRRLENLIAQLPGEKKNGLFGNLIALSLGLTPNFKSNFDLAEDAKLQLSKDTYDDDLDNLLAQIGDQYADLFLAAKNLSDAILLSDILRVNTEITKAPLSASMIKRYDEHHQDLTLLKALVRQQLPEKYKEIFFDQSKNGYAGYIDGGASQEEFYKFIKPILEKMDGTEELLVKLNREDLLRKQRTFDNGSIPHQIHLGELHAILRRQEDFYPFLKDNREKIEKILTFRIPYYVGPLARGNSRFAWMTRKSEETITPWNFEEVVDKGASAQSFIERMTNFDKNLPNEKVLPKHSLLYEYFTVYNELTKVKYVTEGMRKPAFLSGEQKKAIVDLLFKTNRKVTVKQLKEDYFKKIECFDSVEISGVEDRFNASLGTYHDLLKIIKDKDFLDNEENEDILEDIVLTLTLFEDREMIEERLKTYAHLFDDKVMKQLKRRRYTGWGRLSRKLINGIRDKQSGKTILDFLKSDGFANRNFMQLIHDDSLTFKEDIQKAQVSGQGDSLHEHIANLAGSPAIKKGILQTVKVVDELVKVMGRHKPENIVIEMARENQTTQKGQKNSRERMKRIEEGIKELGSQILKEHPVENTQLQNEKLYLYYLQNGRDMYVDQELDINRLSDYDVDHIVPQSFLKDDSIDNKVLTRSDKNRGKSDNVPSEEVVKKMKNYWRQLLNAKLITQRKFDNLTKAERGGLSELDKAGFIKRQLVETRQITKHVAQILDSRMNTKYDENDKLIREVKVITLKSKLVSDFRKDFQFYKVREINNYHHAHDAYLNAVVGTALIKKYPKLESEFVYGDYKVYDVRKMIAKSEQEIGKATAKYFFYSNIMNFFKTEITLANGEIRKRPLIETNGETGEIVWDKGRDFATVRKVLSMPQVNIVKKTEVQTGGFSKESILPKRNSDKLIARKKDWDPKKYGGFDSPTVAYSVLVVAKVEKGKSKKLKSVKELLGITIMERSSFEKNPIDFLEAKGYKEVKKDLIIKLPKYSLFELENGRKRMLASAGELQKGNELALPSKYVNFLYLASHYEKLKGSPEDNEQKQLFVEQHKHYLDEIIEQISEFSKRVILADANLDKVLSAYNKHRDKPIREQAENIIHLFTLTNLGAPAAFKYFDTTIDKKRYTSTKEVLDATLIHQSITGLYETRIDLSQLGGDGGGSPKKKRKV

SEQ ID NO: 8 - RNA, 8184 nt, synthetic construct
  misc_feature 1..8184: note = Synthetic: Cas9-Cas9 fusion(mRNA B with HiBit tag)-mRNA sequence
  source 1..8184: mol_type = other RNA
gggaagctcagaataaacgctcaactttggccggatctgccaccatggacggctccggcggcggctcccccaagaagaagcggaaggtgggcggctccggcggcggcgccgccttcaagcccaaccccatcaactacatcctgggcctggacatcggcatcgcctccgtgggctgggccatggtggagatcgacgaggaggagaaccccatccggctgatcgacctgggcgtgcgggtgttcgagcgggccgaggtgcccaagaccggcgactccctggccatggcccggcggctggcccggtccgtgcggcggctgacccggcggcgggcccaccggctgctgcgggcccggcggctgctgaagcgggagggcgtgctgcaggccgccgacttcgacgagaacggcctgatcaagtccctgcccaacaccccctggcagctgcgggccgccgccctggaccggaagctgacccccctggagtggtccgccgtgctgctgcacctgatcaagcaccggggctacctgtcccagcggaagaacgagggcgagaccgccgacaaggagctgggcgccctgctgaagggcgtggccaacaacgcccacgccctgcagaccggcgacttccggacccccgccgagctggccctgaacaagttcgagaaggagtccggccacatccggaaccagcggggcgactactcccacaccttctcccggaaggacctgcaggccgagctgatcctgctgttcgagaagcagaaggagttcggcaacccccacgtgtccggcggcctgaaggagggcatcgagaccctgctgatgacccagcggcccgccctgtccggcgacgccgtgcagaagatgctgggccactgcaccttcgagcccgccgagcccaaggccgccaagaacacctacaccgccgagcggttcatctggctgaccaagctgaacaacctgcggatcctggagcagggctccgagcggcccctgaccgacaccgagcgggccaccctgatggacgagccctaccggaagtccaagctgacctacgcccaggcccggaagctgctgggcctggaggacaccgccttcttcaagggcctgcggtacggcaaggacaacgccgaggcctccaccctgatggagatgaaggcctaccacgccatctcccgggccctggagaaggagggcctgaaggacaagaagtcccccctgaacctgtcctccgagctgcaggacgagatcggcaccgccttctccctgttcaagaccgacgaggacatcaccggccggctgaaggaccgggtgcagcccgagatcctggaggccctgctgaagcacatctccttcgacaagttcgtgcagatctccctgaaggccctgcggcggatcgtgcccctgatggagcagggcaagcggtacgacgaggcctgcgccgagatctacggcgaccactacggcaagaagaacaccgaggagaagatctacctgccccccatccccgccgacgagatccggaaccccgtggtgctgcgggccctgtcccaggcccggaaggtgatcaacggcgtggtgcggcggtacggctcccccgcccggatccacatcgagaccgcccgggaggtgggcaagtccttcaaggaccggaaggagatcgagaagcggcaggaggagaaccggaaggaccgggagaaggccgccgccaagttccgggagtacttccccaacttcgtgggcgagcccaagtccaaggacatcctgaagctgcggctgtacgagcagcagcacggcaagtgcctgtactccggcaaggagatcaacctggtgcggctgaacgagaagggctacgtggagatcgaccacgccctgcccttctcccggacctgggacgactccttcaacaacaaggtgctggtgctgggctccgagaaccagaacaagggcaaccagaccccctacgagtacttcaacggcaaggacaactcccgggagtggcaggagttcaaggcccgggtggagacctcccggttcccccggtccaagaagcagcggatcctgctgcagaagttcgacgaggacggcttcaaggagtgcaacctgaacgacacccggtacgtgaaccggttcctgtgccagttcgtggccgaccacatcctgctgaccggcaagggcaagcggcgggtgttcgcctccaacggccagatcaccaacctgctgcggggcttctggggcctgcggaaggtgcgggccgagaacgaccggcaccacgccctggacgccgtggtggtggcctgctccaccgtggccatgcagcagaagatcacccggttcgtgcggtacaaggagatgaacgccttcgacggcaagaccatcgacaaggagaccggcaaggtgctgcaccagaagacccacttcccccagccctgggagttcttcgcccaggaggtgatgatccgggtgttcggcaagcccgacggcaagcccgagttcgaggaggccgacacccccgagaagctgcggaccctgctggccgagaagctgtcctcccggcccgaggccgtgcacgagtacgtgacccccctgttcgtgtcccgggcccccaaccggaagatgtccggcgcccacaaggacaccctgcggtccgccaagcggttcgtgaagcacaacgagaagatctccgtgaagcgggtgtggctgaccgagatcaagctggccgacctggagaacatggtgaactacaagaacggccgggagatcgagctgtacgaggccctgaaggcccggctggaggcctacggcggcaacgccaagcaggccttcgaccccaaggacaaccccttctacaagaagggcggccagctggtgaaggccgtgcgggtggagaagacccaggagtccggcgtgctgctgaacaagaagaacgcctacaccatcgccgacaacggcgacatggtgcgggtggacgtgttctgcaaggtggacaagaagggcaagaaccagtacttcatcgtgcccatctacgcctggcaggtggccgagaacatcctgcccgacatcgactgcaagggctaccggatcgacgactcctacaccttctgcttctccctgcacaagtacgacctgatcgccttccagaaggacgagaagtccaaggtggagttcgcctactacatcaactgcgactcctccaacggccggttctacctggcctggcacgacaagggctccaaggagcagcagttccggatctccacccagaacctggtgctgatccagaagtaccaggtgaacgagctgggcaaggagatccggccctgccggctgaagaagcggccccccgtgcggggcgcccccgagtccgccaccgagtccggcggcacctccaccgagtccgagggctccgccggcacctccaccgagtccgagggctccgccggctccgccggctccacctccggctcctcctccggcgacaagaagtactccatcggcctggacatcggcaccaactccgtgggctgggccgtgatcaccgacgagtacaaggtgccctccaagaagttcaaggtgctgggcaacaccgaccggcactccatcaagaagaacctgatcggcgccctgctgttcgactccggcgagaccgccgaggccacccggctgaagcggaccgcccggcggcggtacacccggcggaagaaccggatctgctacctgcaggagatcttctccaacgagatggccaaggtggacgactccttcttccaccggctggaggagtccttcctggtggaggaggacaagaagcacgagcggcaccccatcttcggcaacatcgtggacgaggtggcctaccacgagaagtaccccaccatctaccacctgcggaagaagctggtggactccaccgacaaggccgacctgcggctgatctacctggccctggcccacatgatcaagttccggggccacttcctgatcgagggcgacctgaaccccgacaactccgacgtggacaagctgttcatccagctggtgcagacctacaaccagctgttcgaggagaaccccatcaacgcctccggcgtggacgccaaggccatcctgtccgcccggctgtccaagtcccggcggctggagaacctgatcgcccagctgcccggcgagaagaagaacggcctgttcggcaacctgatcgccctgtccctgggcctgacccccaacttcaagtccaacttcgacctggccgaggacgccaagctgcagctgtccaaggacacctacgacgacgacctggacaacctgctggcccagatcggcgaccagtacgccgacctgttcctggccgccaagaacctgtccgacgccatcctgctgtccgacatcctgcgggtgaacaccgagatcaccaaggcccccctgtccgcctccatgatcaagcggtacgacgagcaccaccaggacctgaccctgctgaaggccctggtgcggcagcagctgcccgagaagtacaaggagatcttcttcgaccagtccaagaacggctacgccggctacatcgacggcggcgcctcccaggaggagttctacaagttcatcaagcccatcctggagaagatggacggcaccgaggagctgctggtgaagctgaaccgggaggacctgctgcggaagcagcggaccttcgacaacggctccatcccccaccagatccacctgggcgagctgcacgccatcctgcggcggcaggaggacttctaccccttcctgaaggacaaccgggagaagatcgagaagatcctgaccttccggatcccctactacgtgggccccctggcccggggcaactcccggttcgcctggatgacccggaagtccgaggagaccatcaccccctggaacttcgaggaggtggtggacaagggcgcctccgcccagtccttcatcgagcggatgaccaacttcgacaagaacctgcccaacgagaaggtgctgcccaagcactccctgctgtacgagtacttcaccgtgtacaacgagctgaccaaggtgaagtacgtgaccgagggcatgcggaagcccgccttcctgtccggcgagcagaagaaggccatcgtggacctgctgttcaagaccaaccggaaggtgaccgtgaagcagctgaaggaggactacttcaagaagatcgagtgcttcgactccgtggagatctccggcgtggaggaccggttcaacgcctccctgggcacctaccacgacctgctgaagatcatcaaggacaaggacttcctggacaacgaggagaacgaggacatcctggaggacatcgtgctgaccctgaccctgttcgaggaccgggagatgatcgaggagcggctgaagacctacgcccacctgttcgacgacaaggtgatgaagcagctgaagcggcggcggtacaccggctggggccggctgtcccggaagctgatcaacggcatccgggacaagcagtccggcaagaccatcctggacttcctgaagtccgacggcttcgccaaccggaacttcatgcagctgatccacgacgactccctgaccttcaaggaggacatccagaaggcccaggtgtccggccagggcgactccctgcacgagcacatcgccaacctggccggctcccccgccatcaagaagggcatcctgcagaccgtgaaggtggtggacgagctggtgaaggtgatgggccggcacaagcccgagaacatcgtgatcgagatggcccgggagaaccagaccacccagaagggccagaagaactcccgggagcggatgaagcggatcgaggagggcatcaaggagctgggctcccagatcctgaaggagcaccccgtggagaacacccagctgcagaacgagaagctgtacctgtactacctgcagaacggccgggacatgtacgtggaccaggagctggacatcaaccggctgtccgactacgacgtggaccacatcgtgccccagtccttcctgaaggacgactccatcgacaacaaggtgctgacccggtccgacaagaaccggggcaagtccgacaacgtgccctccgaggaggtggtgaagaagatgaagaactactggcggcagctgctgaacgccaagctgatcacccagcggaagttcgacaacctgaccaaggccgagcggggcggcctgtccgagctggacaaggccggcttcatcaagcggcagctggtggagacccggcagatcaccaagcacgtggcccagatcctggactcccggatgaacaccaagtacgacgagaacgacaagctgatccgggaggtgaaggtgatcaccctgaagtccaagctggtgtccgacttccggaaggacttccagttctacaaggtgcgggagatcaacaactaccaccacgcccacgacgcctacctgaacgccgtggtgggcaccgccctgatcaagaagtaccccaagctggagtccgagttcgtgtacggcgactacaaggtgtacgacgtgcggaagatgatcgccaagtccgagcaggagatcggcaaggccaccgccaagtacttcttctactccaacatcatgaacttcttcaagaccgagatcaccctggccaacggcgagatccggaagcggcccctgatcgagaccaacggcgagaccggcgagatcgtgtgggacaagggccgggacttcgccaccgtgcggaaggtgctgtccatgccccaggtgaacatcgtgaagaagaccgaggtgcagaccggcggcttctccaaggagtccatcctgcccaagcggaactccgacaagctgatcgcccggaagaaggactgggaccccaagaagtacggcggcttcgactcccccaccgtggcctactccgtgctggtggtggccaaggtggagaagggcaagtccaagaagctgaagtccgtgaaggagctgctgggcatcaccatcatggagcggtcctccttcgagaagaaccccatcgacttcctggaggccaagggctacaaggaggtgaagaaggacctgatcatcaagctgcccaagtactccctgttcgagctggagaacggccggaagcggatgctggcctccgccggcgagctgcagaagggcaacgagctggccctgccctccaagtacgtgaacttcctgtacctggcctcccactacgagaagctgaagggctcccccgaggacaacgagcagaagcagctgttcgtggagcagcacaagcactacctggacgagatcatcgagcagatctccgagttctccaagcgggtgatcctggccgacgccaacctggacaaggtgctgtccgcctacaacaagcaccgggacaagcccatccgggagcaggccgagaacatcatccacctgttcaccctgaccaacctgggcgcccccgccgccttcaagtacttcgacaccaccatcgacaagaagcggtacacctccaccaaggaggtgctggacgccaccctgatccaccagtccatcaccggcctgtacgagacccggatcgacctgtcccagctgggcggcgacggcggcggctcccccaagaagaagcggaaggtgtccgagtccgccacccccgagtccgtgtccggctggcggctgttcaagaagatctcctagctagcaccagcctcaagaacacccgaatggagtctctaagctacataataccaacttacactttacaaaatgttgtcccccaaaatgtagccattcgtatctgctcctaataaaaagaaagtttcttcacattctctcgagaaaaaaaaaaaatggaaaaaaaaaaaacggaaaaaaaaaaaaggtaaaaaaaaaaaatataaaaaaaaaaaacataaaaaaaaaaaacgaaaaaaaaaaaacgtaaaaaaaaaaaactcaaaaaaaaaaagataaaaaaaaaaaacctaaaaaaaaaaaatgtaaaaaaaaaaaagggaaaaaaaaaaaacgcaaaaaaaaaaaacacaaaaaaaaaaaatgcaaaaaaaaaaaatcgaaaaaaaaaaaatctaaaaaaaaaaaacgaaaaaaaaaaaacccaaaaaaaaaaaagacaaaaaaaaaaaatagaaaaaaaaaaagttaaaaaaaaaaaactgaaaaaaaaaaaatttaaaaaaaaaaaatctag

SEQ ID NO: 9 - RNA, 7626 nt, synthetic construct
  misc_feature 1..7626: note = Synthetic: Cas9-Cas9 fusion(mRNA B with HiBit tag)-ORF sequence
  source 1..7626: mol_type = other RNA
atggacggctccggcggcggctcccccaagaagaagcggaaggtgggcggctccggcggcggcgccgccttcaagcccaaccccatcaactacatcctgggcctggacatcggcatcgcctccgtgggctgggccatggtggagatcgacgaggaggagaaccccatccggctgatcgacctgggcgtgcgggtgttcgagcgggccgaggtgcccaagaccggcgactccctggccatggcccggcggctggcccggtccgtgcggcggctgacccggcggcgggcccaccggctgctgcgggcccggcggctgctgaagcgggagggcgtgctgcaggccgccgacttcgacgagaacggcctgatcaagtccctgcccaacaccccctggcagctgcgggccgccgccctggaccggaagctgacccccctggagtggtccgccgtgctgctgcacctgatcaagcaccggggctacctgtcccagcggaagaacgagggcgagaccgccgacaaggagctgggcgccctgctgaagggcgtggccaacaacgcccacgccctgcagaccggcgacttccggacccccgccgagctggccctgaacaagttcgagaaggagtccggccacatccggaaccagcggggcgactactcccacaccttctcccggaaggacctgcaggccgagctgatcctgctgttcgagaagcagaaggagttcggcaacccccacgtgtccggcggcctgaaggagggcatcgagaccctgctgatgacccagcggcccgccctgtccggcgacgccgtgcagaagatgctgggccactgcaccttcgagcccgccgagcccaaggccgccaagaacacctacaccgccgagcggttcatctggctgaccaagctgaacaacctgcggatcctggagcagggctccgagcggcccctgaccgacaccgagcgggccaccctgatggacgagccctaccggaagtccaagctgacctacgcccaggcccggaagctgctgggcctggaggacaccgccttcttcaagggcctgcggtacggcaaggacaacgccgaggcctccaccctgatggagatgaaggcctaccacgccatctcccgggccctggagaaggagggcctgaaggacaagaagtcccccctgaacctgtcctccgagctgcaggacgagatcggcaccgccttctccctgttcaagaccgacgaggacatcaccggccggctgaaggaccgggtgcagcccgagatcctggaggccctgctgaagcacatctccttcgacaagttcgtgcagatctccctgaaggccctgcggcggatcgtgcccctgatggagcagggcaagcggtacgacgaggcctgcgccgagatctacggcgaccactacggcaagaagaacaccgaggagaagatctacctgccccccatccccgccgacgagatccggaaccccgtggtgctgcgggccctgtcccaggcccggaaggtgatcaacggcgtggtgcggcggtacggctcccccgcccggatccacatcgagaccgcccgggaggtgggcaagtccttcaaggaccggaaggagatcgagaagcggcaggaggagaaccggaaggaccgggagaaggccgccgccaagttccgggagtacttccccaacttcgtgggcgagcccaagtccaaggacatcctgaagctgcggctgtacgagcagcagcacggcaagtgcctgtactccggcaaggagatcaacctggtgcggctgaacgagaagggctacgtggagatcgaccacgccctgcccttctcccggacctgggacgactccttcaacaacaaggtgctggtgctgggctccgagaaccagaacaagggcaaccagaccccctacgagtacttcaacggcaaggacaactcccgggagtggcaggagttcaaggcccgggtggagacctcccggttcccccggtccaagaagcagcggatcctgctgcagaagttcgacgaggacggcttcaaggagtgcaacctgaacgacacccggtacgtgaaccggttcctgtgccagttcgtggccgaccacatcctgctgaccggcaagggcaagcggcgggtgttcgcctccaacggccagatcaccaacctgctgcggggcttctggggcctgcggaaggtgcgggccgagaacgaccggcaccacgccctggacgccgtggtggtggcctgctccaccgtggccatgcagcagaagatcacccggttcgtgcggtacaaggagatgaacgccttcgacggcaagaccatcgacaaggagaccggcaaggtgctgcaccagaagacccacttcccccagccctgggagttcttcgcccaggaggtgatgatccgggtgttcggcaagcccgacggcaagcccgagttcgaggaggccgacacccccgagaagctgcggaccctgctggccgagaagctgtcctcccggcccgaggccgtgcacgagtacgtgacccccctgttcgtgtcccgggcccccaaccggaagatgtccggcgcccacaaggacaccctgcggtccgccaagcggttcgtgaagcacaacgagaagatctccgtgaagcgggtgtggctgaccgagatcaagctggccgacctggagaacatggtgaactacaagaacggccgggagatcgagctgtacgaggccctgaaggcccggctggaggcctacggcggcaacgccaagcaggccttcgaccccaaggacaaccccttctacaagaagggcggccagctggtgaaggccgtgcgggtggagaagacccaggagtccggcgtgctgctgaacaagaagaacgcctacaccatcgccgacaacggcgacatggtgcgggtggacgtgttctgcaaggtggacaagaagggcaagaaccagtacttcatcgtgcccatctacgcctggcaggtggccgagaacatcctgcccgacatcgactgcaagggctaccggatcgacgactcctacaccttctgcttctccctgcacaagtacgacctgatcgccttccagaaggacgagaagtccaaggtggagttcgcctactacatcaactgcgactcctccaacggccggttctacctggcctggcacgacaagggctccaaggagcagcagttccggatctccacccagaacctggtgctgatccagaagtaccaggtgaacgagctgggcaaggagatccggccctgccggctgaagaagcggccccccgtgcggggcgcccccgagtccgccaccgagtccggcggcacctccaccgagtccgagggctccgccggcacctccaccgagtccgagggctccgccggctccgccggctccacctccggctcctcctccggcgacaagaagtactccatcggcctggacatcggcaccaactccgtgggctgggccgtgatcaccgacgagtacaaggtgccctccaagaagttcaaggtgctgggcaacaccgaccggcactccatcaagaagaacctgatcggcgccctgctgttcgactccggcgagaccgccgaggccacccggctgaagcggaccgcccggcggcggtacacccggcggaagaaccggatctgctacctgcaggagatcttctccaacgagatggccaaggtggacgactccttcttccaccggctggaggagtccttcctggtggaggaggacaagaagcacgagcggcaccccatcttcggcaacatcgtggacgaggtggcctaccacgagaagtaccccaccatctaccacctgcggaagaagctggtggactccaccgacaaggccgacctgcggctgatctacctggccctggcccacatgatcaagttccggggccacttcctgatcgagggcgacctgaaccccgacaactccgacgtggacaagctgttcatccagctggtgcagacctacaaccagctgttcgaggagaaccccatcaacgcctccggcgtggacgccaaggccatcctgtccgcccggctgtccaagtcccggcggctggagaacctgatcgcccagctgcccggcgagaagaagaacggcctgttcggcaacctgatcgccctgtccctgggcctgacccccaacttcaagtccaacttcgacctggccgaggacgccaagctgcagctgtccaaggacacctacgacgacgacctggacaacctgctggcccagatcggcgaccagtacgccgacctgttcctggccgccaagaacctgtccgacgccatcctgctgtccgacatcctgcgggtgaacaccgagatcaccaaggcccccctgtccgcctccatgatcaagcggtacgacgagcaccaccaggacctgaccctgctgaaggccctggtgcggcagcagctgcccgagaagtacaaggagatcttcttcgaccagtccaagaacggctacgccggctacatcgacggcggcgcctcccaggaggagttctacaagttcatcaagcccatcctggagaagatggacggcaccgaggagctgctggtgaagctgaaccgggaggacctgctgcggaagcagcggaccttcgacaacggctccatcccccaccagatccacctgggcgagctgcacgccatcctgcggcggcaggaggacttctaccccttcctgaaggacaaccgggagaagatcgagaagatcctgaccttccggatcccctactacgtgggccccctggcccggggcaactcccggttcgcctggatgacccggaagtccgaggagaccatcaccccctggaacttcgaggaggtggtggacaagggcgcctccgcccagtccttcatcgagcggatgaccaacttcgacaagaacctgcccaacgagaaggtgctgcccaagcactccctgctgtacgagtacttcaccgtgtacaacgagctgaccaaggtgaagtacgtgaccgagggcatgcggaagcccgccttcctgtccggcgagcagaagaaggccatcgtggacctgctgttcaagaccaaccggaaggtgaccgtgaagcagctgaaggaggactacttcaagaagatcgagtgcttcgactccgtggagatctccggcgtggaggaccggttcaacgcctccctgggcacctaccacgacctgctgaagatcatcaaggacaaggacttcctggacaacgaggagaacgaggacatcctggaggacatcgtgctgaccctgaccctgttcgaggaccgggagatgatcgaggagcggctgaagacctacgcccacctgttcgacgacaaggtgatgaagcagctgaagcggcggcggtacaccggctggggccggctgtcccggaagctgatcaacggcatccgggacaagcagtccggcaagaccatcctggacttcctgaagtccgacggcttcgccaaccggaacttcatgcagctgatccacgacgactccctgaccttcaaggaggacatccagaaggcccaggtgtccggccagggcgactccctgcacgagcacatcgccaacctggccggctcccccgccatcaagaagggcatcctgcagaccgtgaaggtggtggacgagctggtgaaggtgatgggccggcacaagcccgagaacatcgtgatcgagatggcccgggagaaccagaccacccagaagggccagaagaactcccgggagcggatgaagcggatcgaggagggcatcaaggagctgggctcccagatcctgaaggagcaccccgtggagaacacccagctgcagaacgagaagctgtacctgtactacctgcagaacggccgggacatgtacgtggaccaggagctggacatcaaccggctgtccgactacgacgtggaccacatcgtgccccagtccttcctgaaggacgactccatcgacaacaaggtgctgacccggtccgacaagaaccggggcaagtccgacaacgtgccctccgaggaggtggtgaagaagatgaagaactactggcggcagctgctgaacgccaagctgatcacccagcggaagttcgacaacctgaccaaggccgagcggggcggcctgtccgagctggacaaggccggcttcatcaagcggcagctggtggagacccggcagatcaccaagcacgtggcccagatcctggactcccggatgaacaccaagtacgacgagaacgacaagctgatccgggaggtgaaggtgatcaccctgaagtccaagctggtgtccgacttccggaaggacttccagttctacaaggtgcgggagatcaacaactaccaccacgcccacgacgcctacctgaacgccgtggtgggcaccgccctgatcaagaagtaccccaagctggagtccgagttcgtgtacggcgactacaaggtgtacgacgtgcggaagatgatcgccaagtccgagcaggagatcggcaaggccaccgccaagtacttcttctactccaacatcatgaacttcttcaagaccgagatcaccctggccaacggcgagatccggaagcggcccctgatcgagaccaacggcgagaccggcgagatcgtgtgggacaagggccgggacttcgccaccgtgcggaaggtgctgtccatgccccaggtgaacatcgtgaagaagaccgaggtgcagaccggcggcttctccaaggagtccatcctgcccaagcggaactccgacaagctgatcgcccggaagaaggactgggaccccaagaagtacggcggcttcgactcccccaccgtggcctactccgtgctggtggtggccaaggtggagaagggcaagtccaagaagctgaagtccgtgaaggagctgctgggcatcaccatcatggagcggtcctccttcgagaagaaccccatcgacttcctggaggccaagggctacaaggaggtgaagaaggacctgatcatcaagctgcccaagtactccctgttcgagctggagaacggccggaagcggatgctggcctccgccggcgagctgcagaagggcaacgagctggccctgccctccaagtacgtgaacttcctgtacctggcctcccactacgagaagctgaagggctcccccgaggacaacgagcagaagcagctgttcgtggagcagcacaagcactacctggacgagatcatcgagcagatctccgagttctccaagcgggtgatcctggccgacgccaacctggacaaggtgctgtccgcctacaacaagcaccgggacaagcccatccgggagcaggccgagaacatcatccacctgttcaccctgaccaacctgggcgcccccgccgccttcaagtacttcgacaccaccatcgacaagaagcggtacacctccaccaaggaggtgctggacgccaccctgatccaccagtccatcaccggcctgtacgagacccggatcgacctgtcccagctgggcggcgacggcggcggctcccccaagaagaagcggaaggtgtccgagtccgccacccccgagtccgtgtccggctggcggctgttcaagaagatctcctag

SEQ ID NO: 10 - protein, 2541 aa, synthetic construct
  REGION 1..2541: note = Synthetic: Cas9-Cas9 fusion(mRNA B with HiBit tag)-amino acid sequence
MDGSGGGSPKKKRKVGGSGGGAAFKPNPINYILGLDIGIASVGWAMVEIDEEENPIRLIDLGVRVFERAEVPKTGDSLAMARRLARSVRRLTRRRAHRLLRARRLLKREGVLQAADFDENGLIKSLPNTPWQLRAAALDRKLTPLEWSAVLLHLIKHRGYLSQRKNEGETADKELGALLKGVANNAHALQTGDFRTPAELALNKFEKESGHIRNQRGDYSHTFSRKDLQAELILLFEKQKEFGNPHVSGGLKEGIETLLMTQRPALSGDAVQKMLGHCTFEPAEPKAAKNTYTAERFIWLTKLNNLRILEQGSERPLTDTERATLMDEPYRKSKLTYAQARKLLGLEDTAFFKGLRYGKDNAEASTLMEMKAYHAISRALEKEGLKDKKSPLNLSSELQDEIGTAFSLFKTDEDITGRLKDRVQPEILEALLKHISFDKFVQISLKALRRIVPLMEQGKRYDEACAEIYGDHYGKKNTEEKIYLPPIPADEIRNPVVLRALSQARKVINGVVRRYGSPARIHIETAREVGKSFKDRKEIEKRQEENRKDREKAAAKFREYFPNFVGEPKSKDILKLRLYEQQHGKCLYSGKEINLVRLNEKGYVEIDHALPFSRTWDDSFNNKVLVLGSENQNKGNQTPYEYFNGKDNSREWQEFKARVETSRFPRSKKQRILLQKFDEDGFKECNLNDTRYVNRFLCQFVADHILLTGKGKRRVFASNGQITNLLRGFWGLRKVRAENDRHHALDAVVVACSTVAMQQKITRFVRYKEMNAFDGKTIDKETGKVLHQKTHFPQPWEFFAQEVMIRVFGKPDGKPEFEEADTPEKLRTLLAEKLSSRPEAVHEYVTPLFVSRAPNRKMSGAHKDTLRSAKRFVKHNEKISVKRVWLTEIKLADLENMVNYKNGREIELYEALKARLEAYGGNAKQAFDPKDNPFYKKGGQLVKAVRVEKTQESGVLLNKKNAYTIADNGDMVRVDVFCKVDKKGKNQYFIVPIYAWQVAENILPDIDCKGYRIDDSYTFCFSLHKYDLIAFQKDEKSKVEFAYYINCDSSNGRFYLAWHDKGSKEQQFRISTQNLVLIQKYQVNELGKEIRPCRLKKRPPVRGAPESATESGGTSTESEGSAGTSTESEGSAGSAGSTSGSSSGDKKYSIGLDIGTNSVGWAVITDEYKVPSKKFKVLGNTDRHSIKKNLIGALLFDSGETAEATRLKRTARRRYTRRKNRICYLQEIFSNEMAKVDDSFFHRLEESFLVEEDKKHERHPIFGNIVDEVAYHEKYPTIYHLRKKLVDSTDKADLRLIYLALAHMIKFRGHFLIEGDLNPDNSDVDKLFIQLVQTYNQLFEENPINASGVDAKAILSARLSKSRRLENLIAQLPGEKKNGLFGNLIALSLGLTPNFKSNFDLAEDAKLQLSKDTYDDDLDNLLAQIGDQYADLFLAAKNLSDAILLSDILRVNTEITKAPLSASMIKRYDEHHQDLTLLKALVRQQLPEKYKEIFFDQSKNGYAGYIDGGASQEEFYKFIKPILEKMDGTEELLVKLNREDLLRKQRTFDNGSIPHQIHLGELHAILRRQEDFYPFLKDNREKIEKILTFRIPYYVGPLARGNSRFAWMTRKSEETITPWNFEEVVDKGASAQSFIERMTNFDKNLPNEKVLPKHSLLYEYFTVYNELTKVKYVTEGMRKPAFLSGEQKKAIVDLLFKTNRKVTVKQLKEDYFKKIECFDSVEISGVEDRFNASLGTYHDLLKIIKDKDFLDNEENEDILEDIVLTLTLFEDREMIEERLKTYAHLFDDKVMKQLKRRRYTGWGRLSRKLINGIRDKQSGKTILDFLKSDGFANRNFMQLIHDDSLTFKEDIQKAQVSGQGDSLHEHIANLAGSPAIKKGILQTVKVVDELVKVMGRHKPENIVIEMARENQTTQKGQKNSRERMKRIEEGIKELGSQILKEHPVENTQLQNEKLYLYYLQNGRDMYVDQELDINRLSDYDVDHIVPQSFLKDDSIDNKVLTRSDKNRGKSDNVPSEEVVKKMKNYWRQLLNAKLITQRKFDNLTKAERGGLSELDKAGFIKRQLVETRQITKHVAQILDSRMNTKYDENDKLIREVKVITLKSKLVSDFRKDFQFYKVREINNYHHAHDAYLNAVVGTALIKKYPKLESEFVYGDYKVYDVRKMIAKSEQEIGKATAKYFFYSNIMNFFKTEITLANGEIRKRPLIETNGETGEIVWDKGRDFATVRKVLSMPQVNIVKKTEVQTGGFSKESILPKRNSDKLIARKKDWDPKKYGGFDSPTVAYSVLVVAKVEKGKSKKLKSVKELLGITIMERSSFEKNPIDFLEAKGYKEVKKDLIIKLPKYSLFELENGRKRMLASAGELQKGNELALPSKYVNFLYLASHYEKLKGSPEDNEQKQLFVEQHKHYLDEIIEQISEFSKRVILADANLDKVLSAYNKHRDKPIREQAENIIHLFTLTNLGAPAAFKYFDTTIDKKRYTSTKEVLDATLIHQSITGLYETRIDLSQLGGDGGGSPKKKRKVSESATPESVSGWRLFKKIS

SEQ ID NO: 11 - RNA, 8124 nt, synthetic construct
  misc_feature 1..8124: note = Synthetic: Cas9-Cas9 fusion(mRNA C)-mRNA sequence
  source 1..8124: mol_type = other RNA
gggaagctcagaataaacgctcaactttggccggatctgccaccatggccgccttcaagcccaaccccatcaactacatcctgggcctggacatcggcatcgcctccgtgggctgggccatggtggagatcgacgaggaggagaaccccatccggctgatcgacctgggcgtgcgggtgttcgagcgggccgaggtgcccaagaccggcgactccctggccatggcccggcggctggcccggtccgtgcggcggctgacccggcggcgggcccaccggctgctgcgggcccggcggctgctgaagcgggagggcgtgctgcaggccgccgacttcgacgagaacggcctgatcaagtccctgcccaacaccccctggcagctgcgggccgccgccctggaccggaagctgacccccctggagtggtccgccgtgctgctgcacctgatcaagcaccggggctacctgtcccagcggaagaacgagggcgagaccgccgacaaggagctgggcgccctgctgaagggcgtggccaacaacgcccacgccctgcagaccggcgacttccggacccccgccgagctggccctgaacaagttcgagaaggagtccggccacatccggaaccagcggggcgactactcccacaccttctcccggaaggacctgcaggccgagctgatcctgctgttcgagaagcagaaggagttcggcaacccccacgtgtccggcggcctgaaggagggcatcgagaccctgctgatgacccagcggcccgccctgtccggcgacgccgtgcagaagatgctgggccactgcaccttcgagcccgccgagcccaaggccgccaagaacacctacaccgccgagcggttcatctggctgaccaagctgaacaacctgcggatcctggagcagggctccgagcggcccctgaccgacaccgagcgggccaccctgatggacgagccctaccggaagtccaagctgacctacgcccaggcccggaagctgctgggcctggaggacaccgccttcttcaagggcctgcggtacggcaaggacaacgccgaggcctccaccctgatggagatgaaggcctaccacgccatctcccgggccctggagaaggagggcctgaaggacaagaagtcccccctgaacctgtcctccgagctgcaggacgagatcggcaccgccttctccctgttcaagaccgacgaggacatcaccggccggctgaaggaccgggtgcagcccgagatcctggaggccctgctgaagcacatctccttcgacaagttcgtgcagatctccctgaaggccctgcggcggatcgtgcccctgatggagcagggcaagcggtacgacgaggcctgcgccgagatctacggcgaccactacggcaagaagaacaccgaggagaagatctacctgccccccatccccgccgacgagatccggaaccccgtggtgctgcgggccctgtcccaggcccggaaggtgatcaacggcgtggtgcggcggtacggctcccccgcccggatccacatcgagaccgcccgggaggtgggcaagtccttcaaggaccggaaggagatcgagaagcggcaggaggagaaccggaaggaccgggagaaggccgccgccaagttccgggagtacttccccaacttcgtgggcgagcccaagtccaaggacatcctgaagctgcggctgtacgagcagcagcacggcaagtgcctgtactccggcaaggagatcaacctggtgcggctgaacgagaagggctacgtggagatcgaccacgccctgcccttctcccggacctgggacgactccttcaacaacaaggtgctggtgctgggctccgagaaccagaacaagggcaaccagaccccctacgagtacttcaacggcaaggacaactcccgggagtggcaggagttcaaggcccgggtggagacctcccggttcccccggtccaagaagcagcggatcctgctgcagaagttcgacgaggacggcttcaaggagtgcaacctgaacgacacccggtacgtgaaccggttcctgtgccagttcgtggccgaccacatcctgctgaccggcaagggcaagcggcgggtgttcgcctccaacggccagatcaccaacctgctgcggggcttctggggcctgcggaaggtgcgggccgagaacgaccggcaccacgccctggacgccgtggtggtggcctgctccaccgtggccatgcagcagaagatcacccggttcgtgcggtacaaggagatgaacgccttcgacggcaagaccatcgacaaggagaccggcaaggtgctgcaccagaagacccacttcccccagccctgggagttcttcgcccaggaggtgatgatccgggtgttcggcaagcccgacggcaagcccgagttcgaggaggccgacacccccgagaagctgcggaccctgctggccgagaagctgtcctcccggcccgaggccgtgcacgagtacgtgacccccctgttcgtgtcccgggcccccaaccggaagatgtccggcgcccacaaggacaccctgcggtccgccaagcggttcgtgaagcacaacgagaagatctccgtgaagcgggtgtggctgaccgagatcaagctggccgacctggagaacatggtgaactacaagaacggccgggagatcgagctgtacgaggccctgaaggcccggctggaggcctacggcggcaacgccaagcaggccttcgaccccaaggacaaccccttctacaagaagggcggccagctggtgaaggccgtgcgggtggagaagacccaggagtccggcgtgctgctgaacaagaagaacgcctacaccatcgccgacaacggcgacatggtgcgggtggacgtgttctgcaaggtggacaagaagggcaagaaccagtacttcatcgtgcccatctacgcctggcaggtggccgagaacatcctgcccgacatcgactgcaagggctaccggatcgacgactcctacaccttctgcttctccctgcacaagtacgacctgatcgccttccagaaggacgagaagtccaaggtggagttcgcctactacatcaactgcgactcctccaacggccggttctacctggcctggcacgacaagggctccaaggagcagcagttccggatctccacccagaacctggtgctgatccagaagtaccaggtgaacgagctgggcaaggagatccggccctgccggctgaagaagcggccccccgtgcggggcgcccccgagtccgccaccgagtccggcggcacctccaccgagtccgagggctccgccggcacctccaccgagtccgagggctccgccggctccgccggctccacctccggctcctcctccggcgacaagaagtactccatcggcctggacatcggcaccaactccgtgggctgggccgtgatcaccgacgagtacaaggtgccctccaagaagttcaaggtgctgggcaacaccgaccggcactccatcaagaagaacctgatcggcgccctgctgttcgactccggcgagaccgccgaggccacccggctgaagcggaccgcccggcggcggtacacccggcggaagaaccggatctgctacctgcaggagatcttctccaacgagatggccaaggtggacgactccttcttccaccggctggaggagtccttcctggtggaggaggacaagaagcacgagcggcaccccatcttcggcaacatcgtggacgaggtggcctaccacgagaagtaccccaccatctaccacctgcggaagaagctggtggactccaccgacaaggccgacctgcggctgatctacctggccctggcccacatgatcaagttccggggccacttcctgatcgagggcgacctgaaccccgacaactccgacgtggacaagctgttcatccagctggtgcagacctacaaccagctgttcgaggagaaccccatcaacgcctccggcgtggacgccaaggccatcctgtccgcccggctgtccaagtcccggcggctggagaacctgatcgcccagctgcccggcgagaagaagaacggcctgttcggcaacctgatcgccctgtccctgggcctgacccccaacttcaagtccaacttcgacctggccgaggacgccaagctgcagctgtccaaggacacctacgacgacgacctggacaacctgctggcccagatcggcgaccagtacgccgacctgttcctggccgccaagaacctgtccgacgccatcctgctgtccgacatcctgcgggtgaacaccgagatcaccaaggcccccctgtccgcctccatgatcaagcggtacgacgagcaccaccaggacctgaccctgctgaaggccctggtgcggcagcagctgcccgagaagtacaaggagatcttcttcgaccagtccaagaacggctacgccggctacatcgacggcggcgcctcccaggaggagttctacaagttcatcaagcccatcctggagaagatggacggcaccgaggagctgctggtgaagctgaaccgggaggacctgctgcggaagcagcggaccttcgacaacggctccatcccccaccagatccacctgggcgagctgcacgccatcctgcggcggcaggaggacttctaccccttcctgaaggacaaccgggagaagatcgagaagatcctgaccttccggatcccctactacgtgggccccctggcccggggcaactcccggttcgcctggatgacccggaagtccgaggagaccatcaccccctggaacttcgaggaggtggtggacaagggcgcctccgcccagtccttcatcgagcggatgaccaacttcgacaagaacctgcccaacgagaaggtgctgcccaagcactccctgctgtacgagtacttcaccgtgtacaacgagctgaccaaggtgaagtacgtgaccgagggcatgcggaagcccgccttcctgtccggcgagcagaagaaggccatcgtggacctgctgttcaagaccaaccggaaggtgaccgtgaagcagctgaaggaggactacttcaagaagatcgagtgcttcgactccgtggagatctccggcgtggaggaccggttcaacgcctccctgggcacctaccacgacctgctgaagatcatcaaggacaaggacttcctggacaacgaggagaacgaggacatcctggaggacatcgtgctgaccctgaccctgttcgaggaccgggagatgatcgaggagcggctgaagacctacgcccacctgttcgacgacaaggtgatgaagcagctgaagcggcggcggtacaccggctggggccggctgtcccggaagctgatcaacggcatccgggacaagcagtccggcaagaccatcctggacttcctgaagtccgacggcttcgccaaccggaacttcatgcagctgatccacgacgactccctgaccttcaaggaggacatccagaaggcccaggtgtccggccagggcgactccctgcacgagcacatcgccaacctggccggctcccccgccatcaagaagggcatcctgcagaccgtgaaggtggtggacgagctggtgaaggtgatgggccggcacaagcccgagaacatcgtgatcgagatggcccgggagaaccagaccacccagaagggccagaagaactcccgggagcggatgaagcggatcgaggagggcatcaaggagctgggctcccagatcctgaaggagcaccccgtggagaacacccagctgcagaacgagaagctgtacctgtactacctgcagaacggccgggacatgtacgtggaccaggagctggacatcaaccggctgtccgactacgacgtggaccacatcgtgccccagtccttcctgaaggacgactccatcgacaacaaggtgctgacccggtccgacaagaaccggggcaagtccgacaacgtgccctccgaggaggtggtgaagaagatgaagaactactggcggcagctgctgaacgccaagctgatcacccagcggaagttcgacaacctgaccaaggccgagcggggcggcctgtccgagctggacaaggccggcttcatcaagcggcagctggtggagacccggcagatcaccaagcacgtggcccagatcctggactcccggatgaacaccaagtacgacgagaacgacaagctgatccgggaggtgaaggtgatcaccctgaagtccaagctggtgtccgacttccggaaggacttccagttctacaaggtgcgggagatcaacaactaccaccacgcccacgacgcctacctgaacgccgtggtgggcaccgccctgatcaagaagtaccccaagctggagtccgagttcgtgtacggcgactacaaggtgtacgacgtgcggaagatgatcgccaagtccgagcaggagatcggcaaggccaccgccaagtacttcttctactccaacatcatgaacttcttcaagaccgagatcaccctggccaacggcgagatccggaagcggcccctgatcgagaccaacggcgagaccggcgagatcgtgtgggacaagggccgggacttcgccaccgtgcggaaggtgctgtccatgccccaggtgaacatcgtgaagaagaccgaggtgcagaccggcggcttctccaaggagtccatcctgcccaagcggaactccgacaagctgatcgcccggaagaaggactgggaccccaagaagtacggcggcttcgactcccccaccgtggcctactccgtgctggtggtggccaaggtggagaagggcaagtccaagaagctgaagtccgtgaaggagctgctgggcatcaccatcatggagcggtcctccttcgagaagaaccccatcgacttcctggaggccaagggctacaaggaggtgaagaaggacctgatcatcaagctgcccaagtactccctgttcgagctggagaacggccggaagcggatgctggcctccgccggcgagctgcagaagggcaacgagctggccctgccctccaagtacgtgaacttcctgtacctggcctcccactacgagaagctgaagggctcccccgaggacaacgagcagaagcagctgttcgtggagcagcacaagcactacctggacgagatcatcgagcagatctccgagttctccaagcgggtgatcctggccgacgccaacctggacaaggtgctgtccgcctacaacaagcaccgggacaagcccatccgggagcaggccgagaacatcatccacctgttcaccctgaccaacctgggcgcccccgccgccttcaagtacttcgacaccaccatcgacaagaagcggtacacctccaccaaggaggtgctggacgccaccctgatccaccagtccatcaccggcctgtacgagacccggatcgacctgtcccagctgggcggcgacggcggcggctcccccaagaagaagcggaaggtgtccgagtccgccacccccgagtccgtgtccggctggcggctgttcaagaagatctcctagctagcaccagcctcaagaacacccgaatggagtctctaagctacataataccaacttacactttacaaaatgttgtcccccaaaatgtagccattcgtatctgctcctaataaaaagaaagtttcttcacattctctcgagaaaaaaaaaaaatggaaaaaaaaaaaacggaaaaaaaaaaaaggtaaaaaaaaaaaatataaaaaaaaaaaacataaaaaaaaaaaacgaaaaaaaaaaaacgtaaaaaaaaaaaactcaaaaaaaaaaagataaaaaaaaaaaacctaaaaaaaaaaaatgtaaaaaaaaaaaagggaaaaaaaaaaaacgcaaaaaaaaaaaacacaaaaaaaaaaaatgcaaaaaaaaaaaatcgaaaaaaaaaaaatctaaaaaaaaaaaacgaaaaaaaaaaaacccaaaaaaaaaaaagacaaaaaaaaaaaatagaaaaaaaaaaagttaaaaaaaaaaaactgaaaaaaaaaaaatttaaaaaaaaaaaatctag

SEQ ID NO: 12 - RNA, 7566 nt, synthetic construct
  misc_feature 1..7566: note = Synthetic: Cas9-Cas9 fusion(mRNA C)-ORF sequence
  source 1..7566: mol_type = other RNA
atggccgccttcaagcccaaccccatcaactacatcctgggcctggacatcggcatcgcctccgtgggctgggccatggtggagatcgacgaggaggagaaccccatccggctgatcgacctgggcgtgcgggtgttcgagcgggccgaggtgcccaagaccggcgactccctggccatggcccggcggctggcccggtccgtgcggcggctgacccggcggcgggcccaccggctgctgcgggcccggcggctgctgaagcgggagggcgtgctgcaggccgccgacttcgacgagaacggcctgatcaagtccctgcccaacaccccctggcagctgcgggccgccgccctggaccggaagctgacccccctggagtggtccgccgtgctgctgcacctgatcaagcaccggggctacctgtcccagcggaagaacgagggcgagaccgccgacaaggagctgggcgccctgctgaagggcgtggccaacaacgcccacgccctgcagaccggcgacttccggacccccgccgagctggccctgaacaagttcgagaaggagtccggccacatccggaaccagcggggcgactactcccacaccttctcccggaaggacctgcaggccgagctgatcctgctgttcgagaagcagaaggagttcggcaacccccacgtgtccggcggcctgaaggagggcatcgagaccctgctgatgacccagcggcccgccctgtccggcgacgccgtgcagaagatgctgggccactgcaccttcgagcccgccgagcccaaggccgccaagaacacctacaccgccgagcggttcatctggctgaccaagctgaacaacctgcggatcctggagcagggctccgagcggcccctgaccgacaccgagcgggccaccctgatggacgagccctaccggaagtccaagctgacctacgcccaggcccggaagctgctgggcctggaggacaccgccttcttcaagggcctgcggtacggcaaggacaacgccgaggcctccaccctgatggagatgaaggcctaccacgccatctcccgggccctggagaaggagggcctgaaggacaagaagtcccccctgaacctgtcctccgagctgcaggacgagatcggcaccgccttctccctgttcaagaccgacgaggacatcaccggccggctgaaggaccgggtgcagcccgagatcctggaggccctgctgaagcacatctccttcgacaagttcgtgcagatctccctgaaggccctgcggcggatcgtgcccctgatggagcagggcaagcggtacgacgaggcctgcgccgagatctacggcgaccactacggcaagaagaacaccgaggagaagatctacctgccccccatccccgccgacgagatccggaaccccgtggtgctgcgggccctgtcccaggcccggaaggtgatcaacggcgtggtgcggcggtacggctcccccgcccggatccacatcgagaccgcccgggaggtgggcaagtccttcaaggaccggaaggagatcgagaagcggcaggaggagaaccggaaggaccgggagaaggccgccgccaagttccgggagtacttccccaacttcgtgggcgagcccaagtccaaggacatcctgaagctgcggctgtacgagcagcagcacggcaagtgcctgtactccggcaaggagatcaacctggtgcggctgaacgagaagggctacgtggagatcgaccacgccctgcccttctcccggacctgggacgactccttcaacaacaaggtgctggtgctgggctccgagaaccagaacaagggcaaccagaccccctacgagtacttcaacggcaaggacaactcccgggagtggcaggagttcaaggcccgggtggagacctcccggttcccccggtccaagaagcagcggatcctgctgcagaagttcgacgaggacggcttcaaggagtgcaacctgaacgacacccggtacgtgaaccggttcctgtgccagttcgtggccgaccacatcctgctgaccggcaagggcaagcggcgggtgttcgcctccaacggccagatcaccaacctgctgcggggcttctggggcctgcggaaggtgcgggccgagaacgaccggcaccacgccctggacgccgtggtggtggcctgctccaccgtggccatgcagcagaagatcacccggttcgtgcggtacaaggagatgaacgccttcgacggcaagaccatcgacaaggagaccggcaaggtgctgcaccagaagacccacttcccccagccctgggagttcttcgcccaggaggtgatgatccgggtgttcggcaagcccgacggcaagcccgagttcgaggaggccgacacccccgagaagctgcggaccctgctggccgagaagctgtcctcccggcccgaggccgtgcacgagtacgtgacccccctgttcgtgtcccgggcccccaaccggaagatgtccggcgcccacaaggacaccctgcggtccgccaagcggttcgtgaagcacaacgagaagatctccgtgaagcgggtgtggctgaccgagatcaagctggccgacctggagaacatggtgaactacaagaacggccgggagatcgagctgtacgaggccctgaaggcccggctggaggcctacggcggcaacgccaagcaggccttcgaccccaaggacaaccccttctacaagaagggcggccagctggtgaaggccgtgcgggtggagaagacccaggagtccggcgtgctgctgaacaagaagaacgcctacaccatcgccgacaacggcgacatggtgcgggtggacgtgttctgcaaggtggacaagaagggcaagaaccagtacttcatcgtgcccatctacgcctggcaggtggccgagaacatcctgcccgacatcgactgcaagggctaccggatcgacgactcctacaccttctgcttctccctgcacaagtacgacctgatcgccttccagaaggacgagaagtccaaggtggagttcgcctactacatcaactgcgactcctccaacggccggttctacctggcctggcacgacaagggctccaaggagcagcagttccggatctccacccagaacctggtgctgatccagaagtaccaggtgaacgagctgggcaaggagatccggccctgccggctgaagaagcggccccccgtgcggggcgcccccgagtccgccaccgagtccggcggcacctccaccgagtccgagggctccgccggcacctccaccgagtccgagggctccgccggctccgccggctccacctccggctcctcctccggcgacaagaagtactccatcggcctggacatcggcaccaactccgtgggctgggccgtgatcaccgacgagtacaaggtgccctccaagaagttcaaggtgctgggcaacaccgaccggcactccatcaagaagaacctgatcggcgccctgctgttcgactccggcgagaccgccgaggccacccggctgaagcggaccgcccggcggcggtacacccggcggaagaaccggatctgctacctgcaggagatcttctccaacgagatggccaaggtggacgactccttcttccaccggctggaggagtccttcctggtggaggaggacaagaagcacgagcggcaccccatcttcggcaacatcgtggacgaggtggcctaccacgagaagtaccccaccatctaccacctgcggaagaagctggtggactccaccgacaaggccgacctgcggctgatctacctggccctggcccacatgatcaagttccggggccacttcctgatcgagggcgacctgaaccccgacaactccgacgtggacaagctgttcatccagctggtgcagacctacaaccagctgttcgaggagaaccccatcaacgcctccggcgtggacgccaaggccatcctgtccgcccggctgtccaagtcccggcggctggagaacctgatcgcccagctgcccggcgagaagaagaacggcctgttcggcaacctgatcgccctgtccctgggcctgacccccaacttcaagtccaacttcgacctggccgaggacgccaagctgcagctgtccaaggacacctacgacgacgacctggacaacctgctggcccagatcggcgaccagtacgccgacctgttcctggccgccaagaacctgtccgacgccatcctgctgtccgacatcctgcgggtgaacaccgagatcaccaaggcccccctgtccgcctccatgatcaagcggtacgacgagcaccaccaggacctgaccctgctgaaggccctggtgcggcagcagctgcccgagaagtacaaggagatcttcttcgaccagtccaagaacggctacgccggctacatcgacggcggcgcctcccaggaggagttctacaagttcatcaagcccatcctggagaagatggacggcaccgaggagctgctggtgaagctgaaccgggaggacctgctgcggaagcagcggaccttcgacaacggctccatcccccaccagatccacctgggcgagctgcacgccatcctgcggcggcaggaggacttctaccccttcctgaaggacaaccgggagaagatcgagaagatcctgaccttccggatcccctactacgtgggccccctggcccggggcaactcccggttcgcctggatgacccggaagtccgaggagaccatcaccccctggaacttcgaggaggtggtggacaagggcgcctccgcccagtccttcatcgagcggatgaccaacttcgacaagaacctgcccaacgagaaggtgctgcccaagcactccctgctgtacgagtacttcaccgtgtacaacgagctgaccaaggtgaagtacgtgaccgagggcatgcggaagcccgccttcctgtccggcgagcagaagaaggccatcgtggacctgctgttcaagaccaaccggaaggtgaccgtgaagcagctgaaggaggactacttcaagaagatcgagtgcttcgactccgtggagatctccggcgtggaggaccggttcaacgcctccctgggcacctaccacgacctgctgaagatcatcaaggacaaggacttcctggacaacgaggagaacgaggacatcctggaggacatcgtgctgaccctgaccctgttcgaggaccgggagatgatcgaggagcggctgaagacctacgcccacctgttcgacgacaaggtgatgaagcagctgaagcggcggcggtacaccggctggggccggctgtcccggaagctgatcaacggcatccgggacaagcagtccggcaagaccatcctggacttcctgaagtccgacggcttcgccaaccggaacttcatgcagctgatccacgacgactccctgaccttcaaggaggacatccagaaggcccaggtgtccggccagggcgactccctgcacgagcacatcgccaacctggccggctcccccgccatcaagaagggcatcctgcagaccgtgaaggtggtggacgagctggtgaaggtgatgggccggcacaagcccgagaacatcgtgatcgagatggcccgggagaaccagaccacccagaagggccagaagaactcccgggagcggatgaagcggatcgaggagggcatcaaggagctgggctcccagatcctgaaggagcaccccgtggagaacacccagctgcagaacgagaagctgtacctgtactacctgcagaacggccgggacatgtacgtggaccaggagctggacatcaaccggctgtccgactacgacgtggaccacatcgtgccccagtccttcctgaaggacgactccatcgacaacaaggtgctgacccggtccgacaagaaccggggcaagtccgacaacgtgccctccgaggaggtggtgaagaagatgaagaactactggcggcagctgctgaacgccaagctgatcacccagcggaagttcgacaacctgaccaaggccgagcggggcggcctgtccgagctggacaaggccggcttcatcaagcggcagctggtggagacccggcagatcaccaagcacgtggcccagatcctggactcccggatgaacaccaagtacgacgagaacgacaagctgatccgggaggtgaaggtgatcaccctgaagtccaagctggtgtccgacttccggaaggacttccagttctacaaggtgcgggagatcaacaactaccaccacgcccacgacgcctacctgaacgccgtggtgggcaccgccctgatcaagaagtaccccaagctggagtccgagttcgtgtacggcgactacaaggtgtacgacgtgcggaagatgatcgccaagtccgagcaggagatcggcaaggccaccgccaagtacttcttctactccaacatcatgaacttcttcaagaccgagatcaccctggccaacggcgagatccggaagcggcccctgatcgagaccaacggcgagaccggcgagatcgtgtgggacaagggccgggacttcgccaccgtgcggaaggtgctgtccatgccccaggtgaacatcgtgaagaagaccgaggtgcagaccggcggcttctccaaggagtccatcctgcccaagcggaactccgacaagctgatcgcccggaagaaggactgggaccccaagaagtacggcggcttcgactcccccaccgtggcctactccgtgctggtggtggccaaggtggagaagggcaagtccaagaagctgaagtccgtgaaggagctgctgggcatcaccatcatggagcggtcctccttcgagaagaaccccatcgacttcctggaggccaagggctacaaggaggtgaagaaggacctgatcatcaagctgcccaagtactccctgttcgagctggagaacggccggaagcggatgctggcctccgccggcgagctgcagaagggcaacgagctggccctgccctccaagtacgtgaacttcctgtacctggcctcccactacgagaagctgaagggctcccccgaggacaacgagcagaagcagctgttcgtggagcagcacaagcactacctggacgagatcatcgagcagatctccgagttctccaagcgggtgatcctggccgacgccaacctggacaaggtgctgtccgcctacaacaagcaccgggacaagcccatccgggagcaggccgagaacatcatccacctgttcaccctgaccaacctgggcgcccccgccgccttcaagtacttcgacaccaccatcgacaagaagcggtacacctccaccaaggaggtgctggacgccaccctgatccaccagtccatcaccggcctgtacgagacccggatcgacctgtcccagctgggcggcgacggcggcggctcccccaagaagaagcggaaggtgtccgagtccgccacccccgagtccgtgtccggctggcggctgttcaagaagatctcctag

SEQ ID NO: 13 - protein, 2521 aa, synthetic construct
  REGION 1..2521: note = Synthetic: Cas9-Cas9 fusion(mRNA C)-amino acid sequence
MAAFKPNPINYILGLDIGIASVGWAMVEIDEEENPIRLIDLGVRVFERAEVPKTGDSLAMARRLARSVRRLTRRRAHRLLRARRLLKREGVLQAADFDENGLIKSLPNTPWQLRAAALDRKLTPLEWSAVLLHLIKHRGYLSQRKNEGETADKELGALLKGVANNAHALQTGDFRTPAELALNKFEKESGHIRNQRGDYSHTFSRKDLQAELILLFEKQKEFGNPHVSGGLKEGIETLLMTQRPALSGDAVQKMLGHCTFEPAEPKAAKNTYTAERFIWLTKLNNLRILEQGSERPLTDTERATLMDEPYRKSKLTYAQARKLLGLEDTAFFKGLRYGKDNAEASTLMEMKAYHAISRALEKEGLKDKKSPLNLSSELQDEIGTAFSLFKTDEDITGRLKDRVQPEILEALLKHISFDKFVQISLKALRRIVPLMEQGKRYDEACAEIYGDHYGKKNTEEKIYLPPIPADEIRNPVVLRALSQARKVINGVVRRYGSPARIHIETAREVGKSFKDRKEIEKRQEENRKDREKAAAKFREYFPNFVGEPKSKDILKLRLYEQQHGKCLYSGKEINLVRLNEKGYVEIDHALPFSRTWDDSFNNKVLVLGSENQNKGNQTPYEYFNGKDNSREWQEFKARVETSRFPRSKKQRILLQKFDEDGFKECNLNDTRYVNRFLCQFVADHILLTGKGKRRVFASNGQITNLLRGFWGLRKVRAENDRHHALDAVVVACSTVAMQQKITRFVRYKEMNAFDGKTIDKETGKVLHQKTHFPQPWEFFAQEVMIRVFGKPDGKPEFEEADTPEKLRTLLAEKLSSRPEAVHEYVTPLFVSRAPNRKMSGAHKDTLRSAKRFVKHNEKISVKRVWLTEIKLADLENMVNYKNGREIELYEALKARLEAYGGNAKQAFDPKDNPFYKKGGQLVKAVRVEKTQESGVLLNKKNAYTIADNGDMVRVDVFCKVDKKGKNQYFIVPIYAWQVAENILPDIDCKGYRIDDSYTFCFSLHKYDLIAFQKDEKSKVEFAYYINCDSSNGRFYLAWHDKGSKEQQFRISTQNLVLIQKYQVNELGKEIRPCRLKKRPPVRGAPESATESGGTSTESEGSAGTSTESEGSAGSAGSTSGSSSGDKKYSIGLDIGTNSVGWAVITDEYKVPSKKFKVLGNTDRHSIKKNLIGALLFDSGETAEATRLKRTARRRYTRRKNRICYLQEIFSNEMAKVDDSFFHRLEESFLVEEDKKHERHPIFGNIVDEVAYHEKYPTIYHLRKKLVDSTDKADLRLIYLALAHMIKFRGHFLIEGDLNPDNSDVDKLFIQLVQTYNQLFEENPINASGVDAKAILSARLSKSRRLENLIAQLPGEKKNGLFGNLIALSLGLTPNFKSNFDLAEDAKLQLSKDTYDDDLDNLLAQIGDQYADLFLAAKNLSDAILLSDILRVNTEITKAPLSASMIKRYDEHHQDLTLLKALVRQQLPEKYKEIFFDQSKNGYAGYIDGGASQEEFYKFIKPILEKMDGTEELLVKLNREDLLRKQRTFDNGSIPHQIHLGELHAILRRQEDFYPFLKDNREKIEKILTFRIPYYVGPLARGNSRFAWMTRKSEETITPWNFEEVVDKGASAQSFIERMTNFDKNLPNEKVLPKHSLLYEYFTVYNELTKVKYVTEGMRKPAFLSGEQKKAIVDLLFKTNRKVTVKQLKEDYFKKIECFDSVEISGVEDRFNASLGTYHDLLKIIKDKDFLDNEENEDILEDIVLTLTLFEDREMIEERLKTYAHLFDDKVMKQLKRRRYTGWGRLSRKLINGIRDKQSGKTILDFLKSDGFANRNFMQLIHDDSLTFKEDIQKAQVSGQGDSLHEHIANLAGSPAIKKGILQTVKVVDELVKVMGRHKPENIVIEMARENQTTQKGQKNSRERMKRIEEGIKELGSQILKEHPVENTQLQNEKLYLYYLQNGRDMYVDQELDINRLSDYDVDHIVPQSFLKDDSIDNKVLTRSDKNRGKSDNVPSEEVVKKMKNYWRQLLNAKLITQRKFDNLTKAERGGLSELDKAGFIKRQLVETRQITKHVAQILDSRMNTKYDENDKLIREVKVITLKSKLVSDFRKDFQFYKVREINNYHHAHDAYLNAVVGTALIKKYPKLESEFVYGDYKVYDVRKMIAKSEQEIGKATAKYFFYSNIMNFFKTEITLANGEIRKRPLIETNGETGEIVWDKGRDFATVRKVLSMPQVNIVKKTEVQTGGFSKESILPKRNSDKLIARKKDWDPKKYGGFDSPTVAYSVLVVAKVEKGKSKKLKSVKELLGITIMERSSFEKNPIDFLEAKGYKEVKKDLIIKLPKYSLFELENGRKRMLASAGELQKGNELALPSKYVNFLYLASHYEKLKGSPEDNEQKQLFVEQHKHYLDEIIEQISEFSKRVILADANLDKVLSAYNKHRDKPIREQAENIIHLFTLTNLGAPAAFKYFDTTIDKKRYTSTKEVLDATLIHQSITGLYETRIDLSQLGGDGGGSPKKKRKVSESATPESVSGWRLFKKIS

SEQ ID NO: 14 - RNA, 3921 nt, synthetic construct
  misc_feature 1..3921: note = Synthetic: Cas9-Cas9 fusion(mRNA D)-mRNA sequence
  source 1..3921: mol_type = other RNA
gggaagctcagaataaacgctcaactttggccggatctgccaccatggacggctccggcggcggctcccccaagaagaagcggaaggtggaggacaagcggcccgccgccaccaagaaggccggccaggccaagaagaagaagggcggctccggcggcggcgccgccttcaagcccaaccccatcaactacatcctgggcctggacatcggcatcgcctccgtgggctgggccatggtggagatcgacgaggaggagaaccccatccggctgatcgacctgggcgtgcgggtgttcgagcgggccgaggtgcccaagaccggcgactccctggccatggcccggcggctggcccggtccgtgcggcggctgacccggcggcgggcccaccggctgctgcgggcccggcggctgctgaagcgggagggcgtgctgcaggccgccgacttcgacgagaacggcctgatcaagtccctgcccaacaccccctggcagctgcgggccgccgccctggaccggaagctgacccccctggagtggtccgccgtgctgctgcacctgatcaagcaccggggctacctgtcccagcggaagaacgagggcgagaccgccgacaaggagctgggcgccctgctgaagggcgtggccaacaacgcccacgccctgcagaccggcgacttccggacccccgccgagctggccctgaacaagttcgagaaggagtccggccacatccggaaccagcggggcgactactcccacaccttctcccggaaggacctgcaggccgagctgatcctgctgttcgagaagcagaaggagttcggcaacccccacgtgtccggcggcctgaaggagggcatcgagaccctgctgatgacccagcggcccgccctgtccggcgacgccgtgcagaagatgctgggccactgcaccttcgagcccgccgagcccaaggccgccaagaacacctacaccgccgagcggttcatctggctgaccaagctgaacaacctgcggatcctggagcagggctccgagcggcccctgaccgacaccgagcgggccaccctgatggacgagccctaccggaagtccaagctgacctacgcccaggcccggaagctgctgggcctggaggacaccgccttcttcaagggcctgcggtacggcaaggacaacgccgaggcctccaccctgatggagatgaaggcctaccacgccatctcccgggccctggagaaggagggcctgaaggacaagaagtcccccctgaacctgtcctccgagctgcaggacgagatcggcaccgccttctccctgttcaagaccgacgaggacatcaccggccggctgaaggaccgggtgcagcccgagatcctggaggccctgctgaagcacatctccttcgacaagttcgtgcagatctccctgaaggccctgcggcggatcgtgcccctgatggagcagggcaagcggtacgacgaggcctgcgccgagatctacggcgaccactacggcaagaagaacaccgaggagaagatctacctgccccccatccccgccgacgagatccggaaccccgtggtgctgcgggccctgtcccaggcccggaaggtgatcaacggcgtggtgcggcggtacggctcccccgcccggatccacatcgagaccgcccgggaggtgggcaagtccttcaaggaccggaaggagatcgagaagcggcaggaggagaaccggaaggaccgggagaaggccgccgccaagttccgggagtacttccccaacttcgtgggcgagcccaagtccaaggacatcctgaagctgcggctgtacgagcagcagcacggcaagtgcctgtactccggcaaggagatcaacctggtgcggctgaacgagaagggctacgtggagatcgaccacgccctgcccttctcccggacctgggacgactccttcaacaacaaggtgctggtgctgggctccgagaaccagaacaagggcaaccagaccccctacgagtacttcaacggcaaggacaactcccgggagtggcaggagttcaaggcccgggtggagacctcccggttcccccggtccaagaagcagcggatcctgctgcagaagttcgacgaggacggcttcaaggagtgcaacctgaacgacacccggtacgtgaaccggttcctgtgccagttcgtggccgaccacatcctgctgaccggcaagggcaagcggcgggtgttcgcctccaacggccagatcaccaacctgctgcggggcttctggggcctgcggaaggtgcgggccgagaacgaccggcaccacgccctggacgccgtggtggtggcctgctccaccgtggccatgcagcagaagatcacccggttcgtgcggtacaaggagatgaacgccttcgacggcaagaccatcgacaaggagaccggcaaggtgctgcaccagaagacccacttcccccagccctgggagttcttcgcccaggaggtgatgatccgggtgttcggcaagcccgacggcaagcccgagttcgaggaggccgacacccccgagaagctgcggaccctgctggccgagaagctgtcctcccggcccgaggccgtgcacgagtacgtgacccccctgttcgtgtcccgggcccccaaccggaagatgtccggcgcccacaaggacaccctgcggtccgccaagcggttcgtgaagcacaacgagaagatctccgtgaagcgggtgtggctgaccgagatcaagctggccgacctggagaacatggtgaactacaagaacggccgggagatcgagctgtacgaggccctgaaggcccggctggaggcctacggcggcaacgccaagcaggccttcgaccccaaggacaaccccttctacaagaagggcggccagctggtgaaggccgtgcgggtggagaagacccaggagtccggcgtgctgctgaacaagaagaacgcctacaccatcgccgacaacggcgacatggtgcgggtggacgtgttctgcaaggtggacaagaagggcaagaaccagtacttcatcgtgcccatctacgcctggcaggtggccgagaacatcctgcccgacatcgactgcaagggctaccggatcgacgactcctacaccttctgcttctccctgcacaagtacgacctgatcgccttccagaaggacgagaagtccaaggtggagttcgcctactacatcaactgcgactcctccaacggccggttctacctggcctggcacgacaagggctccaaggagcagcagttccggatctccacccagaacctggtgctgatccagaagtaccaggtgaacgagctgggcaaggagatccggccctgccggctgaagaagcggccccccgtgcggtagctagcaccagcctcaagaacacccgaatggagtctctaagctacataataccaacttacactttacaaaatgttgtcccccaaaatgtagccattcgtatctgctcctaataaaaagaaagtttcttcacattctctcgagaaaaaaaaaaaatggaaaaaaaaaaaacggaaaaaaaaaaaaggtaaaaaaaaaaaatataaaaaaaaaaaacataaaaaaaaaaaacgaaaaaaaaaaaacgtaaaaaaaaaaaactcaaaaaaaaaaagataaaaaaaaaaaacctaaaaaaaaaaaatgtaaaaaaaaaaaagggaaaaaaaaaaaacgcaaaaaaaaaaaacacaaaaaaaaaaaatgcaaaaaaaaaaaatcgaaaaaaaaaaaatctaaaaaaaaaaaacgaaaaaaaaaaaacccaaaaaaaaaaaagacaaaaaaaaaaaatagaaaaaaaaaaagttaaaaaaaaaaaactgaaaaaaaaaaaatttaaaaaaaaaaaatctag

SEQ ID NO: 15 - RNA, 3363 nt, synthetic construct
  misc_feature 1..3363: note = Synthetic: Cas9-Cas9 fusion(mRNA D)-ORF sequence
  source 1..3363: mol_type = other RNA
atggacggctccggcggcggctcccccaagaagaagcggaaggtggaggacaagcggcccgccgccaccaagaaggccggccaggccaagaagaagaagggcggctccggcggcggcgccgccttcaagcccaaccccatcaactacatcctgggcctggacatcggcatcgcctccgtgggctgggccatggtggagatcgacgaggaggagaaccccatccggctgatcgacctgggcgtgcgggtgttcgagcgggccgaggtgcccaagaccggcgactccctggccatggcccggcggctggcccggtccgtgcggcggctgacccggcggcgggcccaccggctgctgcgggcccggcggctgctgaagcgggagggcgtgctgcaggccgccgacttcgacgagaacggcctgatcaagtccctgcccaacaccccctggcagctgcgggccgccgccctggaccggaagctgacccccctggagtggtccgccgtgctgctgcacctgatcaagcaccggggctacctgtcccagcggaagaacgagggcgagaccgccgacaaggagctgggcgccctgctgaagggcgtggccaacaacgcccacgccctgcagaccggcgacttccggacccccgccgagctggccctgaacaagttcgagaaggagtccggccacatccggaaccagcggggcgactactcccacaccttctcccggaaggacctgcaggccgagctgatcctgctgttcgagaagcagaaggagttcggcaacccccacgtgtccggcggcctgaaggagggcatcgagaccctgctgatgacccagcggcccgccctgtccggcgacgccgtgcagaagatgctgggccactgcaccttcgagcccgccgagcccaaggccgccaagaacacctacaccgccgagcggttcatctggctgaccaagctgaacaacctgcggatcctggagcagggctccgagcggcccctgaccgacaccgagcgggccaccctgatggacgagccctaccggaagtccaagctgacctacgcccaggcccggaagctgctgggcctggaggacaccgccttcttcaagggcctgcggtacggcaaggacaacgccgaggcctccaccctgatggagatgaaggcctaccacgccatctcccgggccctggagaaggagggcctgaaggacaagaagtcccccctgaacctgtcctccgagctgcaggacgagatcggcaccgccttctccctgttcaagaccgacgaggacatcaccggccggctgaaggaccgggtgcagcccgagatcctggaggccctgctgaagcacatctccttcgacaagttcgtgcagatctccctgaaggccctgcggcggatcgtgcccctgatggagcagggcaagcggtacgacgaggcctgcgccgagatctacggcgaccactacggcaagaagaacaccgaggagaagatctacctgccccccatccccgccgacgagatccggaaccccgtggtgctgcgggccctgtcccaggcccggaaggtgatcaacggcgtggtgcggcggtacggctcccccgcccggatccacatcgagaccgcccgggaggtgggcaagtccttcaaggaccggaaggagatcgagaagcggcaggaggagaaccggaaggaccgggagaaggccgccgccaagttccgggagtacttccccaacttcgtgggcgagcccaagtccaaggacatcctgaagctgcggctgtacgagcagcagcacggcaagtgcctgtactccggcaaggagatcaacctggtgcggctgaacgagaagggctacgtggagatcgaccacgccctgcccttctcccggacctgggacgactccttcaacaacaaggtgctggtgctgggctccgagaaccagaacaagggcaaccagaccccctacgagtacttcaacggcaaggacaactcccgggagtggcaggagttcaaggcccgggtggagacctcccggttcccccggtccaagaagcagcggatcctgctgcagaagttcgacgaggacggcttcaaggagtgcaacctgaacgacacccggtacgtgaaccggttcctgtgccagttcgtggccgaccacatcctgctgaccggcaagggcaagcggcgggtgttcgcctccaacggccagatcaccaacctgctgcggggcttctggggcctgcggaaggtgcgggccgagaacgaccggcaccacgccctggacgccgtggtggtggcctgctccaccgtggccatgcagcagaagatcacccggttcgtgcggtacaaggagatgaacgccttcgacggcaagaccatcgacaaggagaccggcaaggtgctgcaccagaagacccacttcccccagccctgggagttcttcgcccaggaggtgatgatccgggtgttcggcaagcccgacggcaagcccgagttcgaggaggccgacacccccgagaagctgcggaccctgctggccgagaagctgtcctcccggcccgaggccgtgcacgagtacgtgacccccctgttcgtgtcccgggcccccaaccggaagatgtccggcgcccacaaggacaccctgcggtccgccaagcggttcgtgaagcacaacgagaagatctccgtgaagcgggtgtggctgaccgagatcaagctggccgacctggagaacatggtgaactacaagaacggccgggagatcgagctgtacgaggccctgaaggcccggctggaggcctacggcggcaacgccaagcaggccttcgaccccaaggacaaccccttctacaagaagggcggccagctggtgaaggccgtgcgggtggagaagacccaggagtccggcgtgctgctgaacaagaagaacgcctacaccatcgccgacaacggcgacatggtgcgggtggacgtgttctgcaaggtggacaagaagggcaagaaccagtacttcatcgtgcccatctacgcctggcaggtggccgagaacatcctgcccgacatcgactgcaagggctaccggatcgacgactcctacaccttctgcttctccctgcacaagtacgacctgatcgccttccagaaggacgagaagtccaaggtggagttcgcctactacatcaactgcgactcctccaacggccggttctacctggcctggcacgacaagggctccaaggagcagcagttccggatctccacccagaacctggtgctgatccagaagtaccaggtgaacgagctgggcaaggagatccggccctgccggctgaagaagcggccccccgtgcggtag

SEQ ID NO: 16 - protein, 1120 aa, synthetic construct
  REGION 1..1120: note = Synthetic: Cas9-Cas9 fusion(mRNA D)-amino acid sequence
MDGSGGGSPKKKRKVEDKRPAATKKAGQAKKKKGGSGGGAAFKPNPINYILGLDIGIASVGWAMVEIDEEENPIRLIDLGVRVFERAEVPKTGDSLAMARRLARSVRRLTRRRAHRLLRARRLLKREGVLQAADFDENGLIKSLPNTPWQLRAAALDRKLTPLEWSAVLLHLIKHRGYLSQRKNEGETADKELGALLKGVANNAHALQTGDFRTPAELALNKFEKESGHIRNQRGDYSHTFSRKDLQAELILLFEKQKEFGNPHVSGGLKEGIETLLMTQRPALSGDAVQKMLGHCTFEPAEPKAAKNTYTAERFIWLTKLNNLRILEQGSERPLTDTERATLMDEPYRKSKLTYAQARKLLGLEDTAFFKGLRYGKDNAEASTLMEMKAYHAISRALEKEGLKDKKSPLNLSSELQDEIGTAFSLFKTDEDITGRLKDRVQPEILEALLKHISFDKFVQISLKALRRIVPLMEQGKRYDEACAEIYGDHYGKKNTEEKIYLPPIPADEIRNPVVLRALSQARKVINGVVRRYGSPARIHIETAREVGKSFKDRKEIEKRQEENRKDREKAAAKFREYFPNFVGEPKSKDILKLRLYEQQHGKCLYSGKEINLVRLNEKGYVEIDHALPFSRTWDDSFNNKVLVLGSENQNKGNQTPYEYFNGKDNSREWQEFKARVETSRFPRSKKQRILLQKFDEDGFKECNLNDTRYVNRFLCQFVADHILLTGKGKRRVFASNGQITNLLRGFWGLRKVRAENDRHHALDAVVVACSTVAMQQKITRFVRYKEMNAFDGKTIDKETGKVLHQKTHFPQPWEFFAQEVMIRVFGKPDGKPEFEEADTPEKLRTLLAEKLSSRPEAVHEYVTPLFVSRAPNRKMSGAHKDTLRSAKRFVKHNEKISVKRVWLTEIKLADLENMVNYKNGREIELYEALKARLEAYGGNAKQAFDPKDNPFYKKGGQLVKAVRVEKTQESGVLLNKKNAYTIADNGDMVRVDVFCKVDKKGKNQYFIVPIYAWQVAENILPDIDCKGYRIDDSYTFCFSLHKYDLIAFQKDEKSKVEFAYYINCDSSNGRFYLAWHDKGSKEQQFRISTQNLVLIQKYQVNELGKEIRPCRLKKRPPVR

SEQ ID NO: 17 - RNA, 4423 nt, synthetic construct
  misc_feature 1..4423: note = Synthetic: SpyCas9 (mRNA E) -mRNA sequence
  source 1..4423: mol_type = other RNA
gggaagctcagaataaacgctcaactttggccggatctgccaccatggacaagaagtactccatcggcctggacatcggcaccaactccgtgggctgggccgtgatcaccgacgagtacaaggtgccctccaagaagttcaaggtgctgggcaacaccgaccggcactccatcaagaagaacctgatcggcgccctgctgttcgactccggcgagaccgccgaggccacccggctgaagcggaccgcccggcggcggtacacccggcggaagaaccggatctgctacctgcaggagatcttctccaacgagatggccaaggtggacgactccttcttccaccggctggaggagtccttcctggtggaggaggacaagaagcacgagcggcaccccatcttcggcaacatcgtggacgaggtggcctaccacgagaagtaccccaccatctaccacctgcggaagaagctggtggactccaccgacaaggccgacctgcggctgatctacctggccctggcccacatgatcaagttccggggccacttcctgatcgagggcgacctgaaccccgacaactccgacgtggacaagctgttcatccagctggtgcagacctacaaccagctgttcgaggagaaccccatcaacgcctccggcgtggacgccaaggccatcctgtccgcccggctgtccaagtcccggcggctggagaacctgatcgcccagctgcccggcgagaagaagaacggcctgttcggcaacctgatcgccctgtccctgggcctgacccccaacttcaagtccaacttcgacctggccgaggacgccaagctgcagctgtccaaggacacctacgacgacgacctggacaacctgctggcccagatcggcgaccagtacgccgacctgttcctggccgccaagaacctgtccgacgccatcctgctgtccgacatcctgcgggtgaacaccgagatcaccaaggcccccctgtccgcctccatgatcaagcggtacgacgagcaccaccaggacctgaccctgctgaaggccctggtgcggcagcagctgcccgagaagtacaaggagatcttcttcgaccagtccaagaacggctacgccggctacatcgacggcggcgcctcccaggaggagttctacaagttcatcaagcccatcctggagaagatggacggcaccgaggagctgctggtgaagctgaaccgggaggacctgctgcggaagcagcggaccttcgacaacggctccatcccccaccagatccacctgggcgagctgcacgccatcctgcggcggcaggaggacttctaccccttcctgaaggacaaccgggagaagatcgagaagatcctgaccttccggatcccctactacgtgggccccctggcccggggcaactcccggttcgcctggatgacccggaagtccgaggagaccatcaccccctggaacttcgaggaggtggtggacaagggcgcctccgcccagtccttcatcgagcggatgaccaacttcgacaagaacctgcccaacgagaaggtgctgcccaagcactccctgctgtacgagtacttcaccgtgtacaacgagctgaccaaggtgaagtacgtgaccgagggcatgcggaagcccgccttcctgtccggcgagcagaagaaggccatcgtggacctgctgttcaagaccaaccggaaggtgaccgtgaagcagctgaaggaggactacttcaagaagatcgagtgcttcgactccgtggagatctccggcgtggaggaccggttcaacgcctccctgggcacctaccacgacctgctgaagatcatcaaggacaaggacttcctggacaacgaggagaacgaggacatcctggaggacatcgtgctgaccctgaccctgttcgaggaccgggagatgatcgaggagcggctgaagacctacgcccacctgttcgacgacaaggtgatgaagcagctgaagcggcggcggtacaccggctggggccggctgtcccggaagctgatcaacggcatccgggacaagcagtccggcaagaccatcctggacttcctgaagtccgacggcttcgccaaccggaacttcatgcagctgatccacgacgactccctgaccttcaaggaggacatccagaaggcccaggtgtccggccagggcgactccctgcacgagcacatcgccaacctggccggctcccccgccatcaagaagggcatcctgcagaccgtgaaggtggtggacgagctggtgaaggtgatgggccggcacaagcccgagaacatcgtgatcgagatggcccgggagaaccagaccacccagaagggccagaagaactcccgggagcggatgaagcggatcgaggagggcatcaaggagctgggctcccagatcctgaaggagcaccccgtggagaacacccagctgcagaacgagaagctgtacctgtactacctgcagaacggccgggacatgtacgtggaccaggagctggacatcaaccggctgtccgactacgacgtggaccacatcgtgccccagtccttcctgaaggacgactccatcgacaacaaggtgctgacccggtccgacaagaaccggggcaagtccgacaacgtgccctccgaggaggtggtgaagaagatgaagaactactggcggcagctgctgaacgccaagctgatcacccagcggaagttcgacaacctgaccaaggccgagcggggcggcctgtccgagctggacaaggccggcttcatcaagcggcagctggtggagacccggcagatcaccaagcacgtggcccagatcctggactcccggatgaacaccaagtacgacgagaacgacaagctgatccgggaggtgaaggtgatcaccctgaagtccaagctggtgtccgacttccggaaggacttccagttctacaaggtgcgggagatcaacaactaccaccacgcccacgacgcctacctgaacgccgtggtgggcaccgccctgatcaagaagtaccccaagctggagtccgagttcgtgtacggcgactacaaggtgtacgacgtgcggaagatgatcgccaagtccgagcaggagatcggcaaggccaccgccaagtacttcttctactccaacatcatgaacttcttcaagaccgagatcaccctggccaacggcgagatccggaagcggcccctgatcgagaccaacggcgagaccggcgagatcgtgtgggacaagggccgggacttcgccaccgtgcggaaggtgctgtccatgccccaggtgaacatcgtgaagaagaccgaggtgcagaccggcggcttctccaaggagtccatcctgcccaagcggaactccgacaagctgatcgcccggaagaaggactgggaccccaagaagtacggcggcttcgactcccccaccgtggcctactccgtgctggtggtggccaaggtggagaagggcaagtccaagaagctgaagtccgtgaaggagctgctgggcatcaccatcatggagcggtcctccttcgagaagaaccccatcgacttcctggaggccaagggctacaaggaggtgaagaaggacctgatcatcaagctgcccaagtactccctgttcgagctggagaacggccggaagcggatgctggcctccgccggcgagctgcagaagggcaacgagctggccctgccctccaagtacgtgaacttcctgtacctggcctcccactacgagaagctgaagggctcccccgaggacaacgagcagaagcagctgttcgtggagcagcacaagcactacctggacgagatcatcgagcagatctccgagttctccaagcgggtgatcctggccgacgccaacctggacaaggtgctgtccgcctacaacaagcaccgggacaagcccatccgggagcaggccgagaacatcatccacctgttcaccctgaccaacctgggcgcccccgccgccttcaagtacttcgacaccaccatcgaccggaagcggtacacctccaccaaggaggtgctggacgccaccctgatccaccagtccatcaccggcctgtacgagacccggatcgacctgtcccagctgggcggcgacggcggcggctcccccaagaagaagcggaaggtgtgactagcaccagcctcaagaacacccgaatggagtctctaagctacataataccaacttacactttacaaaatgttgtcccccaaaatgtagccattcgtatctgctcctaataaaaagaaagtttcttcacattctctcgagaaaaaaaaaaaaaaaaaaaaaaaaaaaaaaaaaaaaaaaaaaaaaaaaaaaaaaaaaaaaaaaaaaaaaaaaaaaaaaaaaaaaaaaaaaaaatctag

SEQ ID NO: 18 - RNA, 4140 nt, synthetic construct
  misc_feature 1..4140: note = Synthetic: SpyCas9 (mRNA E) -ORF sequence
  source 1..4140: mol_type = other RNA
atggacaagaagtactccatcggcctggacatcggcaccaactccgtgggctgggccgtgatcaccgacgagtacaaggtgccctccaagaagttcaaggtgctgggcaacaccgaccggcactccatcaagaagaacctgatcggcgccctgctgttcgactccggcgagaccgccgaggccacccggctgaagcggaccgcccggcggcggtacacccggcggaagaaccggatctgctacctgcaggagatcttctccaacgagatggccaaggtggacgactccttcttccaccggctggaggagtccttcctggtggaggaggacaagaagcacgagcggcaccccatcttcggcaacatcgtggacgaggtggcctaccacgagaagtaccccaccatctaccacctgcggaagaagctggtggactccaccgacaaggccgacctgcggctgatctacctggccctggcccacatgatcaagttccggggccacttcctgatcgagggcgacctgaaccccgacaactccgacgtggacaagctgttcatccagctggtgcagacctacaaccagctgttcgaggagaaccccatcaacgcctccggcgtggacgccaaggccatcctgtccgcccggctgtccaagtcccggcggctggagaacctgatcgcccagctgcccggcgagaagaagaacggcctgttcggcaacctgatcgccctgtccctgggcctgacccccaacttcaagtccaacttcgacctggccgaggacgccaagctgcagctgtccaaggacacctacgacgacgacctggacaacctgctggcccagatcggcgaccagtacgccgacctgttcctggccgccaagaacctgtccgacgccatcctgctgtccgacatcctgcgggtgaacaccgagatcaccaaggcccccctgtccgcctccatgatcaagcggtacgacgagcaccaccaggacctgaccctgctgaaggccctggtgcggcagcagctgcccgagaagtacaaggagatcttcttcgaccagtccaagaacggctacgccggctacatcgacggcggcgcctcccaggaggagttctacaagttcatcaagcccatcctggagaagatggacggcaccgaggagctgctggtgaagctgaaccgggaggacctgctgcggaagcagcggaccttcgacaacggctccatcccccaccagatccacctgggcgagctgcacgccatcctgcggcggcaggaggacttctaccccttcctgaaggacaaccgggagaagatcgagaagatcctgaccttccggatcccctactacgtgggccccctggcccggggcaactcccggttcgcctggatgacccggaagtccgaggagaccatcaccccctggaacttcgaggaggtggtggacaagggcgcctccgcccagtccttcatcgagcggatgaccaacttcgacaagaacctgcccaacgagaaggtgctgcccaagcactccctgctgtacgagtacttcaccgtgtacaacgagctgaccaaggtgaagtacgtgaccgagggcatgcggaagcccgccttcctgtccggcgagcagaagaaggccatcgtggacctgctgttcaagaccaaccggaaggtgaccgtgaagcagctgaaggaggactacttcaagaagatcgagtgcttcgactccgtggagatctccggcgtggaggaccggttcaacgcctccctgggcacctaccacgacctgctgaagatcatcaaggacaaggacttcctggacaacgaggagaacgaggacatcctggaggacatcgtgctgaccctgaccctgttcgaggaccgggagatgatcgaggagcggctgaagacctacgcccacctgttcgacgacaaggtgatgaagcagctgaagcggcggcggtacaccggctggggccggctgtcccggaagctgatcaacggcatccgggacaagcagtccggcaagaccatcctggacttcctgaagtccgacggcttcgccaaccggaacttcatgcagctgatccacgacgactccctgaccttcaaggaggacatccagaaggcccaggtgtccggccagggcgactccctgcacgagcacatcgccaacctggccggctcccccgccatcaagaagggcatcctgcagaccgtgaaggtggtggacgagctggtgaaggtgatgggccggcacaagcccgagaacatcgtgatcgagatggcccgggagaaccagaccacccagaagggccagaagaactcccgggagcggatgaagcggatcgaggagggcatcaaggagctgggctcccagatcctgaaggagcaccccgtggagaacacccagctgcagaacgagaagctgtacctgtactacctgcagaacggccgggacatgtacgtggaccaggagctggacatcaaccggctgtccgactacgacgtggaccacatcgtgccccagtccttcctgaaggacgactccatcgacaacaaggtgctgacccggtccgacaagaaccggggcaagtccgacaacgtgccctccgaggaggtggtgaagaagatgaagaactactggcggcagctgctgaacgccaagctgatcacccagcggaagttcgacaacctgaccaaggccgagcggggcggcctgtccgagctggacaaggccggcttcatcaagcggcagctggtggagacccggcagatcaccaagcacgtggcccagatcctggactcccggatgaacaccaagtacgacgagaacgacaagctgatccgggaggtgaaggtgatcaccctgaagtccaagctggtgtccgacttccggaaggacttccagttctacaaggtgcgggagatcaacaactaccaccacgcccacgacgcctacctgaacgccgtggtgggcaccgccctgatcaagaagtaccccaagctggagtccgagttcgtgtacggcgactacaaggtgtacgacgtgcggaagatgatcgccaagtccgagcaggagatcggcaaggccaccgccaagtacttcttctactccaacatcatgaacttcttcaagaccgagatcaccctggccaacggcgagatccggaagcggcccctgatcgagaccaacggcgagaccggcgagatcgtgtgggacaagggccgggacttcgccaccgtgcggaaggtgctgtccatgccccaggtgaacatcgtgaagaagaccgaggtgcagaccggcggcttctccaaggagtccatcctgcccaagcggaactccgacaagctgatcgcccggaagaaggactgggaccccaagaagtacggcggcttcgactcccccaccgtggcctactccgtgctggtggtggccaaggtggagaagggcaagtccaagaagctgaagtccgtgaaggagctgctgggcatcaccatcatggagcggtcctccttcgagaagaaccccatcgacttcctggaggccaagggctacaaggaggtgaagaaggacctgatcatcaagctgcccaagtactccctgttcgagctggagaacggccggaagcggatgctggcctccgccggcgagctgcagaagggcaacgagctggccctgccctccaagtacgtgaacttcctgtacctggcctcccactacgagaagctgaagggctcccccgaggacaacgagcagaagcagctgttcgtggagcagcacaagcactacctggacgagatcatcgagcagatctccgagttctccaagcgggtgatcctggccgacgccaacctggacaaggtgctgtccgcctacaacaagcaccgggacaagcccatccgggagcaggccgagaacatcatccacctgttcaccctgaccaacctgggcgcccccgccgccttcaagtacttcgacaccaccatcgaccggaagcggtacacctccaccaaggaggtgctggacgccaccctgatccaccagtccatcaccggcctgtacgagacccggatcgacctgtcccagctgggcggcgacggcggcggctcccccaagaagaagcggaaggtgtga

SEQ ID NO: 19 - protein, 1379 aa, synthetic construct
  REGION 1..1379: note = Synthetic: SpyCas9 (mRNA E) -amino acid sequence
MDKKYSIGLDIGTNSVGWAVITDEYKVPSKKFKVLGNTDRHSIKKNLIGALLFDSGETAEATRLKRTARRRYTRRKNRICYLQEIFSNEMAKVDDSFFHRLEESFLVEEDKKHERHPIFGNIVDEVAYHEKYPTIYHLRKKLVDSTDKADLRLIYLALAHMIKFRGHFLIEGDLNPDNSDVDKLFIQLVQTYNQLFEENPINASGVDAKAILSARLSKSRRLENLIAQLPGEKKNGLFGNLIALSLGLTPNFKSNFDLAEDAKLQLSKDTYDDDLDNLLAQIGDQYADLFLAAKNLSDAILLSDILRVNTEITKAPLSASMIKRYDEHHQDLTLLKALVRQQLPEKYKEIFFDQSKNGYAGYIDGGASQEEFYKFIKPILEKMDGTEELLVKLNREDLLRKQRTFDNGSIPHQIHLGELHAILRRQEDFYPFLKDNREKIEKILTFRIPYYVGPLARGNSRFAWMTRKSEETITPWNFEEVVDKGASAQSFIERMTNFDKNLPNEKVLPKHSLLYEYFTVYNELTKVKYVTEGMRKPAFLSGEQKKAIVDLLFKTNRKVTVKQLKEDYFKKIECFDSVEISGVEDRFNASLGTYHDLLKIIKDKDFLDNEENEDILEDIVLTLTLFEDREMIEERLKTYAHLFDDKVMKQLKRRRYTGWGRLSRKLINGIRDKQSGKTILDFLKSDGFANRNFMQLIHDDSLTFKEDIQKAQVSGQGDSLHEHIANLAGSPAIKKGILQTVKVVDELVKVMGRHKPENIVIEMARENQTTQKGQKNSRERMKRIEEGIKELGSQILKEHPVENTQLQNEKLYLYYLQNGRDMYVDQELDINRLSDYDVDHIVPQSFLKDDSIDNKVLTRSDKNRGKSDNVPSEEVVKKMKNYWRQLLNAKLITQRKFDNLTKAERGGLSELDKAGFIKRQLVETRQITKHVAQILDSRMNTKYDENDKLIREVKVITLKSKLVSDFRKDFQFYKVREINNYHHAHDAYLNAVVGTALIKKYPKLESEFVYGDYKVYDVRKMIAKSEQEIGKATAKYFFYSNIMNFFKTEITLANGEIRKRPLIETNGETGEIVWDKGRDFATVRKVLSMPQVNIVKKTEVQTGGFSKESILPKRNSDKLIARKKDWDPKKYGGFDSPTVAYSVLVVAKVEKGKSKKLKSVKELLGITIMERSSFEKNPIDFLEAKGYKEVKKDLIIKLPKYSLFELENGRKRMLASAGELQKGNELALPSKYVNFLYLASHYEKLKGSPEDNEQKQLFVEQHKHYLDEIIEQISEFSKRVILADANLDKVLSAYNKHRDKPIREQAENIIHLFTLTNLGAPAAFKYFDTTIDRKRYTSTKEVLDATLIHQSITGLYETRIDLSQLGGDGGGSPKKKRKV

SEQ ID NO: 20 - RNA, 3837 nt, synthetic construct
  misc_feature 1..3837: note = Synthetic: Nme2Cas9 (mRNA F) -mRNA sequence
  source 1..3837: mol_type = other RNA
gggaagctcagaataaacgctcaactttggccggatctgccaccatgaccggtgccgccttcaagcccaaccccatcaactacatcctgggcctggacatcggcatcgcctccgtgggctgggccatggtggagatcgacgaggaggagaaccccatccggctgatcgacctgggcgtgcgggtgttcgagcgggccgaggtgcccaagaccggcgactccctggccatggcccggcggctggcccggtccgtgcggcggctgacccggcggcgggcccaccggctgctgcgggcccggcggctgctgaagcgggagggcgtgctgcaggccgccgacttcgacgagaacggcctgatcaagtccctgcccaacaccccctggcagctgcgggccgccgccctggaccggaagctgacccccctggagtggtccgccgtgctgctgcacctgatcaagcaccggggctacctgtcccagcggaagaacgagggcgagaccgccgacaaggagctgggcgccctgctgaagggcgtggccaacaacgcccacgccctgcagaccggcgacttccggacccccgccgagctggccctgaacaagttcgagaaggagtccggccacatccggaaccagcggggcgactactcccacaccttctcccggaaggacctgcaggccgagctgatcctgctgttcgagaagcagaaggagttcggcaacccccacgtgtccggcggcctgaaggagggcatcgagaccctgctgatgacccagcggcccgccctgtccggcgacgccgtgcagaagatgctgggccactgcaccttcgagcccgccgagcccaaggccgccaagaacacctacaccgccgagcggttcatctggctgaccaagctgaacaacctgcggatcctggagcagggctccgagcggcccctgaccgacaccgagcgggccaccctgatggacgagccctaccggaagtccaagctgacctacgcccaggcccggaagctgctgggcctggaggacaccgccttcttcaagggcctgcggtacggcaaggacaacgccgaggcctccaccctgatggagatgaaggcctaccacgccatctcccgggccctggagaaggagggcctgaaggacaagaagtcccccctgaacctgtcctccgagctgcaggacgagatcggcaccgccttctccctgttcaagaccgacgaggacatcaccggccggctgaaggaccgggtgcagcccgagatcctggaggccctgctgaagcacatctccttcgacaagttcgtgcagatctccctgaaggccctgcggcggatcgtgcccctgatggagcagggcaagcggtacgacgaggcctgcgccgagatctacggcgaccactacggcaagaagaacaccgaggagaagatctacctgccccccatccccgccgacgagatccggaaccccgtggtgctgcgggccctgtcccaggcccggaaggtgatcaacggcgtggtgcggcggtacggctcccccgcccggatccacatcgagaccgcccgggaggtgggcaagtccttcaaggaccggaaggagatcgagaagcggcaggaggagaaccggaaggaccgggagaaggccgccgccaagttccgggagtacttccccaacttcgtgggcgagcccaagtccaaggacatcctgaagctgcggctgtacgagcagcagcacggcaagtgcctgtactccggcaaggagatcaacctggtgcggctgaacgagaagggctacgtggagatcgaccacgccctgcccttctcccggacctgggacgactccttcaacaacaaggtgctggtgctgggctccgagaaccagaacaagggcaaccagaccccctacgagtacttcaacggcaaggacaactcccgggagtggcaggagttcaaggcccgggtggagacctcccggttcccccggtccaagaagcagcggatcctgctgcagaagttcgacgaggacggcttcaaggagtgcaacctgaacgacacccggtacgtgaaccgcttcctgtgccagttcgtggccgaccacatcctgctgaccggcaagggcaagcggcgggtgttcgcctccaacggccagatcaccaacctgctgcggggcttctggggcctgcggaaggtgcgggccgagaacgaccggcaccacgccctggacgccgtggtggtggcctgctccaccgtggccatgcagcagaagatcacccggttcgtgcggtacaaggagatgaacgccttcgacggcaagaccatcgacaaggagaccggcaaggtgctgcaccagaagacccacttcccccagccctgggagttcttcgcccaggaggtgatgatccgggtgttcggcaagcccgacggcaagcccgagttcgaggaggccgacacccccgagaagctgcggaccctgctggccgagaagctgtcctcccggcccgaggccgtgcacgagtacgtgacccccctgttcgtgtcccgggcccccaaccggaagatgtccggcgcccacaaggacaccctgcggtccgccaagcggttcgtgaagcacaacgagaagatctccgtgaagcgggtgtggctgaccgagatcaagctggccgacctggagaacatggtgaactacaagaacggccgggagatcgagctgtacgaggccctgaaggcccggctggaggcctacggcggcaacgccaagcaggccttcgaccccaaggacaaccccttctacaagaagggcggccagctggtgaaggccgtgcgggtggagaagacccaggagtccggcgtgctgctgaacaagaagaacgcctacaccatcgccgacaacggcgacatggtgcgggtggacgtgttctgcaaggtggacaagaagggcaagaaccagtacttcatcgtgcccatctacgcctggcaggtggccgagaacatcctgcccgacatcgactgcaagggctaccggatcgacgactcctacaccttctgcttctccctgcacaagtacgacctgatcgccttccagaaggacgagaagtccaaggtggagttcgcctactacatcaactgcgactcctccaacggccggttctacctggcctggcacgacaagggctccaaggagcagcagttccggatctccacccagaacctggtgctgatccagaagtaccaggtgaacgagctgggcaaggagatccggccctgccggctgaagaagcggccccccgtgcggtccggaaagcggaccgccgacggctccgagttcgagtcccccaagaagaagcggaaggtggagtagctagcaccagcctcaagaacacccgaatggagtctctaagctacataataccaacttacactttacaaaatgttgtcccccaaaatgtagccattcgtatctgctcctaataaaaagaaagtttcttcacattctctcgagaaaaaaaaaaaatggaaaaaaaaaaaacggaaaaaaaaaaaaggtaaaaaaaaaaaatataaaaaaaaaaaacataaaaaaaaaaaacgaaaaaaaaaaaacgtaaaaaaaaaaaactcaaaaaaaaaaaagataaaaaaaaaaaacctaaaaaaaaaaaatgtaaaaaaaaaaaagggaaaaaaaaaaaacgcaaaaaaaaaaaacacaaaaaaaaaaaatgcaaaaaaaaaaaatcgaaaaaaaaaaaatctaaaaaaaaaaaacgaaaaaaaaaaaacccaaaaaaaaaaaagacaaaaaaaaaaaatagaaaaaaaaaaaagttaaaaaa

SEQ ID NO: 21 - RNA, 3318 nt, synthetic construct
  misc_feature 1..3318: note = Synthetic: Nme2Cas9 (mRNA F) -ORF sequence
  source 1..3318: mol_type = other RNA
atgaccggtgccgccttcaagcccaaccccatcaactacatcctgggcctggacatcggcatcgcctccgtgggctgggccatggtggagatcgacgaggaggagaaccccatccggctgatcgacctgggcgtgcgggtgttcgagcgggccgaggtgcccaagaccggcgactccctggccatggcccggcggctggcccggtccgtgcggcggctgacccggcggcgggcccaccggctgctgcgggcccggcggctgctgaagcgggagggcgtgctgcaggccgccgacttcgacgagaacggcctgatcaagtccctgcccaacaccccctggcagctgcgggccgccgccctggaccggaagctgacccccctggagtggtccgccgtgctgctgcacctgatcaagcaccggggctacctgtcccagcggaagaacgagggcgagaccgccgacaaggagctgggcgccctgctgaagggcgtggccaacaacgcccacgccctgcagaccggcgacttccggacccccgccgagctggccctgaacaagttcgagaaggagtccggccacatccggaaccagcggggcgactactcccacaccttctcccggaaggacctgcaggccgagctgatcctgctgttcgagaagcagaaggagttcggcaacccccacgtgtccggcggcctgaaggagggcatcgagaccctgctgatgacccagcggcccgccctgtccggcgacgccgtgcagaagatgctgggccactgcaccttcgagcccgccgagcccaaggccgccaagaacacctacaccgccgagcggttcatctggctgaccaagctgaacaacctgcggatcctggagcagggctccgagcggcccctgaccgacaccgagcgggccaccctgatggacgagccctaccggaagtccaagctgacctacgcccaggcccggaagctgctgggcctggaggacaccgccttcttcaagggcctgcggtacggcaaggacaacgccgaggcctccaccctgatggagatgaaggcctaccacgccatctcccgggccctggagaaggagggcctgaaggacaagaagtcccccctgaacctgtcctccgagctgcaggacgagatcggcaccgccttctccctgttcaagaccgacgaggacatcaccggccggctgaaggaccgggtgcagcccgagatcctggaggccctgctgaagcacatctccttcgacaagttcgtgcagatctccctgaaggccctgcggcggatcgtgcccctgatggagcagggcaagcggtacgacgaggcctgcgccgagatctacggcgaccactacggcaagaagaacaccgaggagaagatctacctgccccccatccccgccgacgagatccggaaccccgtggtgctgcgggccctgtcccaggcccggaaggtgatcaacggcgtggtgcggcggtacggctcccccgcccggatccacatcgagaccgcccgggaggtgggcaagtccttcaaggaccggaaggagatcgagaagcggcaggaggagaaccggaaggaccgggagaaggccgccgccaagttccgggagtacttccccaacttcgtgggcgagcccaagtccaaggacatcctgaagctgcggctgtacgagcagcagcacggcaagtgcctgtactccggcaaggagatcaacctggtgcggctgaacgagaagggctacgtggagatcgaccacgccctgcccttctcccggacctgggacgactccttcaacaacaaggtgctggtgctgggctccgagaaccagaacaagggcaaccagaccccctacgagtacttcaacggcaaggacaactcccgggagtggcaggagttcaaggcccgggtggagacctcccggttcccccggtccaagaagcagcggatcctgctgcagaagttcgacgaggacggcttcaaggagtgcaacctgaacgacacccggtacgtgaaccgcttcctgtgccagttcgtggccgaccacatcctgctgaccggcaagggcaagcggcgggtgttcgcctccaacggccagatcaccaacctgctgcggggcttctggggcctgcggaaggtgcgggccgagaacgaccggcaccacgccctggacgccgtggtggtggcctgctccaccgtggccatgcagcagaagatcacccggttcgtgcggtacaaggagatgaacgccttcgacggcaagaccatcgacaaggagaccggcaaggtgctgcaccagaagacccacttcccccagccctgggagttcttcgcccaggaggtgatgatccgggtgttcggcaagcccgacggcaagcccgagttcgaggaggccgacacccccgagaagctgcggaccctgctggccgagaagctgtcctcccggcccgaggccgtgcacgagtacgtgacccccctgttcgtgtcccgggcccccaaccggaagatgtccggcgcccacaaggacaccctgcggtccgccaagcggttcgtgaagcacaacgagaagatctccgtgaagcgggtgtggctgaccgagatcaagctggccgacctggagaacatggtgaactacaagaacggccgggagatcgagctgtacgaggccctgaaggcccggctggaggcctacggcggcaacgccaagcaggccttcgaccccaaggacaaccccttctacaagaagggcggccagctggtgaaggccgtgcgggtggagaagacccaggagtccggcgtgctgctgaacaagaagaacgcctacaccatcgccgacaacggcgacatggtgcgggtggacgtgttctgcaaggtggacaagaagggcaagaaccagtacttcatcgtgcccatctacgcctggcaggtggccgagaacatcctgcccgacatcgactgcaagggctaccggatcgacgactcctacaccttctgcttctccctgcacaagtacgacctgatcgccttccagaaggacgagaagtccaaggtggagttcgcctactacatcaactgcgactcctccaacggccggttctacctggcctggcacgacaagggctccaaggagcagcagttccggatctccacccagaacctggtgctgatccagaagtaccaggtgaacgagctgggcaaggagatccggccctgccggctgaagaagcggccccccgtgcggtccggaaagcggaccgccgacggctccgagttcgagtcccccaagaagaagcggaaggtggagtag

SEQ ID NO: 22 - protein, 1105 aa, synthetic construct
  REGION 1..1105: note = Synthetic: Nme2Cas9 (mRNA F) -amino acid sequence
MTGAAFKPNPINYILGLDIGIASVGWAMVEIDEEENPIRLIDLGVRVFERAEVPKTGDSLAMARRLARSVRRLTRRRAHRLLRARRLLKREGVLQAADFDENGLIKSLPNTPWQLRAAALDRKLTPLEWSAVLLHLIKHRGYLSQRKNEGETADKELGALLKGVANNAHALQTGDFRTPAELALNKFEKESGHIRNQRGDYSHTFSRKDLQAELILLFEKQKEFGNPHVSGGLKEGIETLLMTQRPALSGDAVQKMLGHCTFEPAEPKAAKNTYTAERFIWLTKLNNLRILEQGSERPLTDTERATLMDEPYRKSKLTYAQARKLLGLEDTAFFKGLRYGKDNAEASTLMEMKAYHAISRALEKEGLKDKKSPLNLSSELQDEIGTAFSLFKTDEDITGRLKDRVQPEILEALLKHISFDKFVQISLKALRRIVPLMEQGKRYDEACAEIYGDHYGKKNTEEKIYLPPIPADEIRNPVVLRALSQARKVINGVVRRYGSPARIHIETAREVGKSFKDRKEIEKRQEENRKDREKAAAKFREYFPNFVGEPKSKDILKLRLYEQQHGKCLYSGKEINLVRLNEKGYVEIDHALPFSRTWDDSFNNKVLVLGSENQNKGNQTPYEYFNGKDNSREWQEFKARVETSRFPRSKKQRILLQKFDEDGFKECNLNDTRYVNRFLCQFVADHILLTGKGKRRVFASNGQITNLLRGFWGLRKVRAENDRHHALDAVVVACSTVAMQQKITRFVRYKEMNAFDGKTIDKETGKVLHQKTHFPQPWEFFAQEVMIRVFGKPDGKPEFEEADTPEKLRTLLAEKLSSRPEAVHEYVTPLFVSRAPNRKMSGAHKDTLRSAKRFVKHNEKISVKRVWLTEIKLADLENMVNYKNGREIELYEALKARLEAYGGNAKQAFDPKDNPFYKKGGQLVKAVRVEKTQESGVLLNKKNAYTIADNGDMVRVDVFCKVDKKGKNQYFIVPIYAWQVAENILPDIDCKGYRIDDSYTFCFSLHKYDLIAFQKDEKSKVEFAYYINCDSSNGRFYLAWHDKGSKEQQFRISTQNLVLIQKYQVNELGKEIRPCRLKKRPPVRSGKRTADGSEFESPKKKRKVE

SEQ ID NO: 23 - RNA, 4479 nt, synthetic construct
  misc_feature 1..4479: note = Synthetic: Nme2 Cas9 Intein (mRNA G) - mRNA sequence
  source 1..4479: mol_type = other RNA
gggaagctcagaataaacgctcaactttggccggatctgccaccatggacggctccggcggcggctcccccaagaagaagcggaaggtggaggacaagcggcccgccgccaccaagaaggccggccaggccaagaagaagaagggcggctccggcggcggcgccgccttcaagcccaaccccatcaactacatcctgggcctggacatcggcatcgcctccgtgggctgggccatggtggagatcgacgaggaggagaaccccatccggctgatcgacctgggcgtgcgggtgttcgagcgggccgaggtgcccaagaccggcgactccctggccatggcccggcggctggcccggtccgtgcggcggctgacccggcggcgggcccaccggctgctgcgggcccggcggctgctgaagcgggagggcgtgctgcaggccgccgacttcgacgagaacggcctgatcaagtccctgcccaacaccccctggcagctgcgggccgccgccctggaccggaagctgacccccctggagtggtccgccgtgctgctgcacctgatcaagcaccggggctacctgtcccagcggaagaacgagggcgagaccgccgacaaggagctgggcgccctgctgaagggcgtggccaacaacgcccacgccctgcagaccggcgacttccggacccccgccgagctggccctgaacaagttcgagaaggagtccggccacatccggaaccagcggggcgactactcccacaccttctcccggaaggacctgcaggccgagctgatcctgctgttcgagaagcagaaggagttcggcaacccccacgtgtccggcggcctgaaggagggcatcgagaccctgctgatgacccagcggcccgccctgtccggcgacgccgtgcagaagatgctgggccactgcaccttcgagcccgccgagcccaaggccgccaagaacacctacaccgccgagcggttcatctggctgaccaagctgaacaacctgcggatcctggagcagggctccgagcggcccctgaccgacaccgagcgggccaccctgatggacgagccctaccggaagtccaagctgacctacgcccaggcccggaagctgctgggcctggaggacaccgccttcttcaagggcctgcggtacggcaaggacaacgccgaggcctccaccctgatggagatgaaggcctaccacgccatctcccgggccctggagaaggagggcctgaaggacaagaagtcccccctgaacctgtcctccgagctgcaggacgagatcggcaccgccttctccctgttcaagaccgacgaggacatcaccggccggctgaaggaccgggtgcagcccgagatcctggaggccctgctgaagcacatctccttcgacaagttcgtgcagatctccctgaaggccctgcggcggatcgtgcccctgatggagcagggcaagcggtacgacgaggcctgcgccgagatctacggcgaccactacggcaagaagaacaccgaggagaagatctacctgccccccatccccgccgacgagatccggaaccccgtggtgctgcgggccctgtcccaggcccggaaggtgatcaacggcgtggtgcggcggtacggctcccccgcccggatccacatcgagaccgcccgggaggtgggcaagtccttcaaggaccggaaggagatcgagaagcggcaggaggagaaccggaaggaccgggagaaggccgccgccaagttccgggagtacttccccaacttcgtgggcgagcccaagtccaaggacatcctgaagctgcggctgtacgagcagcagcacggcaagtgcctgtactccggcaaggagatcaacctggtgcggctgaacgagaagggctacgtggagatcgaccacgccctgcccttctcccggacctgggacgactccttcaacaacaaggtgctggtgctgggctccgagaaccagaacaagggcaaccagaccccctacgagtacttcaacggcaaggacaactcccgggagtggcaggagttcaaggcccgggtggagacctcccggttcccccggtccaagaagcagcggatcctgctgcagaagttcgacgaggacggcttcaaggagtgcaacctgaacgacacccggtacgtgaaccggttcctgtgccagttcgtggccgaccacatcctgctgaccggcaagggcaagcggcgggtgttcgcctccaacggccagatcaccaacctgctgcggggcttctggggcctgcggaaggtgcgggccgagaacgaccggcaccacgccctggacgccgtggtggtggcctgctccaccgtggccatgcagcagaagatcacccggttcgtgcggtacaaggagatgaacgccttcgacggcaagaccatcgacaaggagaccggcaaggtgctgcaccagaagacccacttcccccagccctgggagttcttcgcccaggaggtgatgatccgggtgttcggcaagcccgacggcaagcccgagttcgaggaggccgacacccccgagaagctgcggaccctgctggccgagaagctgtcctcccggcccgaggccgtgcacgagtacgtgacccccctgttcgtgtcccgggcccccaaccggaagatgtccggcgcccacaaggacaccctgcggtccgccaagcggttcgtgaagcacaacgagaagatctccgtgaagcgggtgtggctgaccgagatcaagctggccgacctggagaacatggtgaactacaagaacggccgggagatcgagctgtacgaggccctgaaggcccggctggaggcctacggcggcaacgccaagcaggccttcgaccccaaggacaaccccttctacaagaagggcggccagctggtgaaggccgtgcgggtggagaagacccaggagtccggcgtgctgctgaacaagaagaacgcctacaccatcgccgacaacggcgacatggtgcgggtggacgtgttctgcaaggtggacaagaagggcaagaaccagtacttcatcgtgcccatctacgcctggcaggtggccgagaacatcctgcccgacatcgactgcaagggctaccggatcgacgactcctacaccttctgcttctccctgcacaagtacgacctgatcgccttccagaaggacgagaagtccaaggtggagttcgcctactacatcaactgcgactcctccaacggccggttctacctggcctggcacgacaagggctccaaggagcagcagttccggatctccacccagaacctggtgctgatccagaagtaccaggtgaacgagctgggcaaggagatccggccctgccggctgaagaagcggccccccgtgcggggcgcccccgagtccgccaccgagtccggcggcacctccaccgagtccgagggctccgccggcacctccaccgagtccgagggctccgccggctccgccggctccacctccggcggctccggcggcggctccggcggctccggctccgccggcacctccaccgagtccgagggctccgccggcacctccgagtccgccaccgagtccggcggcacctccaccgagtccgagggctcctcctcccggggcaagtgcctgtcctacgagaccgagatcctgaccgtggagtacggcctgctgcccatcgtggtggtggtggagaagcggatcgagtgcaccgtgtactccgtggacaacaacggcaacatctacacccagcccgtggcccagtggcacgaccggggcgagcaggaggtgttcgagtactgcctggaggacggctccctgatccgggccaccaaggaccacaagttcatgaccgtggacggccagatgctgcccatcgacgagatcttcgagcgggagctggacctgatgcgggtggacaacctgcccaactagctagcaccagcctcaagaacacccgaatggagtctctaagctacataataccaacttacactttacaaaatgttgtcccccaaaatgtagccattcgtatctgctcctaataaaaagaaagtttcttcacattctctcgagaaaaaaaaaaaatggaaaaaaaaaaaacggaaaaaaaaaaaaggtaaaaaaaaaaaatataaaaaaaaaaaacataaaaaaaaaaaacgaaaaaaaaaaaacgtaaaaaaaaaaaactcaaaaaaaaaaagataaaaaaaaaaaacctaaaaaaaaaaaatgtaaaaaaaaaaaagggaaaaaaaaaaaacgcaaaaaaaaaaaacacaaaaaaaaaaaatgcaaaaaaaaaaaatcgaaaaaaaaaaaatctaaaaaaaaaaaacgaaaaaaaaaaaacccaaaaaaaaaaaagacaaaaaaaaaaaatagaaaaaaaaaaagttaaaaaaaaaaaactgaaaaaaaaaaaatttaaaaaaaaaaaatctag

SEQ ID NO: 24 - RNA, 3921 nt, synthetic construct
  misc_feature 1..3921: note = Synthetic: Nme2 Cas9 Intein (mRNA G) - ORF sequence
  source 1..3921: mol_type = other RNA
atggacggctccggcggcggctcccccaagaagaagcggaaggtggaggacaagcggcccgccgccaccaagaaggccggccaggccaagaagaagaagggcggctccggcggcggcgccgccttcaagcccaaccccatcaactacatcctgggcctggacatcggcatcgcctccgtgggctgggccatggtggagatcgacgaggaggagaaccccatccggctgatcgacctgggcgtgcgggtgttcgagcgggccgaggtgcccaagaccggcgactccctggccatggcccggcggctggcccggtccgtgcggcggctgacccggcggcgggcccaccggctgctgcgggcccggcggctgctgaagcgggagggcgtgctgcaggccgccgacttcgacgagaacggcctgatcaagtccctgcccaacaccccctggcagctgcgggccgccgccctggaccggaagctgacccccctggagtggtccgccgtgctgctgcacctgatcaagcaccggggctacctgtcccagcggaagaacgagggcgagaccgccgacaaggagctgggcgccctgctgaagggcgtggccaacaacgcccacgccctgcagaccggcgacttccggacccccgccgagctggccctgaacaagttcgagaaggagtccggccacatccggaaccagcggggcgactactcccacaccttctcccggaaggacctgcaggccgagctgatcctgctgttcgagaagcagaaggagttcggcaacccccacgtgtccggcggcctgaaggagggcatcgagaccctgctgatgacccagcggcccgccctgtccggcgacgccgtgcagaagatgctgggccactgcaccttcgagcccgccgagcccaaggccgccaagaacacctacaccgccgagcggttcatctggctgaccaagctgaacaacctgcggatcctggagcagggctccgagcggcccctgaccgacaccgagcgggccaccctgatggacgagccctaccggaagtccaagctgacctacgcccaggcccggaagctgctgggcctggaggacaccgccttcttcaagggcctgcggtacggcaaggacaacgccgaggcctccaccctgatggagatgaaggcctaccacgccatctcccgggccctggagaaggagggcctgaaggacaagaagtcccccctgaacctgtcctccgagctgcaggacgagatcggcaccgccttctccctgttcaagaccgacgaggacatcaccggccggctgaaggaccgggtgcagcccgagatcctggaggccctgctgaagcacatctccttcgacaagttcgtgcagatctccctgaaggccctgcggcggatcgtgcccctgatggagcagggcaagcggtacgacgaggcctgcgccgagatctacggcgaccactacggcaagaagaacaccgaggagaagatctacctgccccccatccccgccgacgagatccggaaccccgtggtgctgcgggccctgtcccaggcccggaaggtgatcaacggcgtggtgcggcggtacggctcccccgcccggatccacatcgagaccgcccgggaggtgggcaagtccttcaaggaccggaaggagatcgagaagcggcaggaggagaaccggaaggaccgggagaaggccgccgccaagttccgggagtacttccccaacttcgtgggcgagcccaagtccaaggacatcctgaagctgcggctgtacgagcagcagcacggcaagtgcctgtactccggcaaggagatcaacctggtgcggctgaacgagaagggctacgtggagatcgaccacgccctgcccttctcccggacctgggacgactccttcaacaacaaggtgctggtgctgggctccgagaaccagaacaagggcaaccagaccccctacgagtacttcaacggcaaggacaactcccgggagtggcaggagttcaaggcccgggtggagacctcccggttcccccggtccaagaagcagcggatcctgctgcagaagttcgacgaggacggcttcaaggagtgcaacctgaacgacacccggtacgtgaaccggttcctgtgccagttcgtggccgaccacatcctgctgaccggcaagggcaagcggcgggtgttcgcctccaacggccagatcaccaacctgctgcggggcttctggggcctgcggaaggtgcgggccgagaacgaccggcaccacgccctggacgccgtggtggtggcctgctccaccgtggccatgcagcagaagatcacccggttcgtgcggtacaaggagatgaacgccttcgacggcaagaccatcgacaaggagaccggcaaggtgctgcaccagaagacccacttcccccagccctgggagttcttcgcccaggaggtgatgatccgggtgttcggcaagcccgacggcaagcccgagttcgaggaggccgacacccccgagaagctgcggaccctgctggccgagaagctgtcctcccggcccgaggccgtgcacgagtacgtgacccccctgttcgtgtcccgggcccccaaccggaagatgtccggcgcccacaaggacaccctgcggtccgccaagcggttcgtgaagcacaacgagaagatctccgtgaagcgggtgtggctgaccgagatcaagctggccgacctggagaacatggtgaactacaagaacggccgggagatcgagctgtacgaggccctgaaggcccggctggaggcctacggcggcaacgccaagcaggccttcgaccccaaggacaaccccttctacaagaagggcggccagctggtgaaggccgtgcgggtggagaagacccaggagtccggcgtgctgctgaacaagaagaacgcctacaccatcgccgacaacggcgacatggtgcgggtggacgtgttctgcaaggtggacaagaagggcaagaaccagtacttcatcgtgcccatctacgcctggcaggtggccgagaacatcctgcccgacatcgactgcaagggctaccggatcgacgactcctacaccttctgcttctccctgcacaagtacgacctgatcgccttccagaaggacgagaagtccaaggtggagttcgcctactacatcaactgcgactcctccaacggccggttctacctggcctggcacgacaagggctccaaggagcagcagttccggatctccacccagaacctggtgctgatccagaagtaccaggtgaacgagctgggcaaggagatccggccctgccggctgaagaagcggccccccgtgcggggcgcccccgagtccgccaccgagtccggcggcacctccaccgagtccgagggctccgccggcacctccaccgagtccgagggctccgccggctccgccggctccacctccggcggctccggcggcggctccggcggctccggctccgccggcacctccaccgagtccgagggctccgccggcacctccgagtccgccaccgagtccggcggcacctccaccgagtccgagggctcctcctcccggggcaagtgcctgtcctacgagaccgagatcctgaccgtggagtacggcctgctgcccatcgtggtggtggtggagaagcggatcgagtgcaccgtgtactccgtggacaacaacggcaacatctacacccagcccgtggcccagtggcacgaccggggcgagcaggaggtgttcgagtactgcctggaggacggctccctgatccgggccaccaaggaccacaagttcatgaccgtggacggccagatgctgcccatcgacgagatcttcgagcgggagctggacctgatgcgggtggacaacctgcccaactag

SEQ ID NO: 25 - protein, 1306 aa, synthetic construct
  REGION 1..1306: note = Synthetic: Nme2 Cas9 Intein (mRNA G) - amino acid sequence
MDGSGGGSPKKKRKVEDKRPAATKKAGQAKKKKGGSGGGAAFKPNPINYILGLDIGIASVGWAMVEIDEEENPIRLIDLGVRVFERAEVPKTGDSLAMARRLARSVRRLTRRRAHRLLRARRLLKREGVLQAADFDENGLIKSLPNTPWQLRAAALDRKLTPLEWSAVLLHLIKHRGYLSQRKNEGETADKELGALLKGVANNAHALQTGDFRTPAELALNKFEKESGHIRNQRGDYSHTFSRKDLQAELILLFEKQKEFGNPHVSGGLKEGIETLLMTQRPALSGDAVQKMLGHCTFEPAEPKAAKNTYTAERFIWLTKLNNLRILEQGSERPLTDTERATLMDEPYRKSKLTYAQARKLLGLEDTAFFKGLRYGKDNAEASTLMEMKAYHAISRALEKEGLKDKKSPLNLSSELQDEIGTAFSLFKTDEDITGRLKDRVQPEILEALLKHISFDKFVQISLKALRRIVPLMEQGKRYDEACAEIYGDHYGKKNTEEKIYLPPIPADEIRNPVVLRALSQARKVINGVVRRYGSPARIHIETAREVGKSFKDRKEIEKRQEENRKDREKAAAKFREYFPNFVGEPKSKDILKLRLYEQQHGKCLYSGKEINLVRLNEKGYVEIDHALPFSRTWDDSFNNKVLVLGSENQNKGNQTPYEYFNGKDNSREWQEFKARVETSRFPRSKKQRILLQKFDEDGFKECNLNDTRYVNRFLCQFVADHILLTGKGKRRVFASNGQITNLLRGFWGLRKVRAENDRHHALDAVVVACSTVAMQQKITRFVRYKEMNAFDGKTIDKETGKVLHQKTHFPQPWEFFAQEVMIRVFGKPDGKPEFEEADTPEKLRTLLAEKLSSRPEAVHEYVTPLFVSRAPNRKMSGAHKDTLRSAKRFVKHNEKISVKRVWLTEIKLADLENMVNYKNGREIELYEALKARLEAYGGNAKQAFDPKDNPFYKKGGQLVKAVRVEKTQESGVLLNKKNAYTIADNGDMVRVDVFCKVDKKGKNQYFIVPIYAWQVAENILPDIDCKGYRIDDSYTFCFSLHKYDLIAFQKDEKSKVEFAYYINCDSSNGRFYLAWHDKGSKEQQFRISTQNLVLIQKYQVNELGKEIRPCRLKKRPPVRGAPESATESGGTSTESEGSAGTSTESEGSAGSAGSTSGGSGGGSGGSGSAGTSTESEGSAGTSESATESGGTSTESEGSSSRGKCLSYETEILTVEYGLLPIVVVVEKRIECTVYSVDNNGNIYTQPVAQWHDRGEQEVFEYCLEDGSLIRATKDHKFMTVDGQMLPIDEIFERELDLMRVDNLPN

SEQ ID NO: 26 - RNA, 4824 nt, synthetic construct
  misc_feature 1..4824: note = Synthetic: Spy-R1333K Cas9 Intein (mRNA H) -mRNA sequence
  source 1..4824: mol_type = other RNA
gggaagctcagaataaacgctcaactttggccggatctgccaccatgatcaagatcgccacccggaagtacctgggcaagcagaacgtgtacgacatcggcgtggagcgggaccacaacttcgccctgaagaacggcttcatcgcctccaactgctgggagggctccggcgacaagaagtactccatcggcctggacatcggcaccaactccgtgggctgggccgtgatcaccgacgagtacaaggtgccctccaagaagttcaaggtgctgggcaacaccgaccggcactccatcaagaagaacctgatcggcgccctgctgttcgactccggcgagaccgccgaggccacccggctgaagcggaccgcccggcggcggtacacccggcggaagaaccggatctgctacctgcaggagatcttctccaacgagatggccaaggtggacgactccttcttccaccggctggaggagtccttcctggtggaggaggacaagaagcacgagcggcaccccatcttcggcaacatcgtggacgaggtggcctaccacgagaagtaccccaccatctaccacctgcggaagaagctggtggactccaccgacaaggccgacctgcggctgatctacctggccctggcccacatgatcaagttccggggccacttcctgatcgagggcgacctgaaccccgacaactccgacgtggacaagctgttcatccagctggtgcagacctacaaccagctgttcgaggagaaccccatcaacgcctccggcgtggacgccaaggccatcctgtccgcccggctgtccaagtcccggcggctggagaacctgatcgcccagctgcccggcgagaagaagaacggcctgttcggcaacctgatcgccctgtccctgggcctgacccccaacttcaagtccaacttcgacctggccgaggacgccaagctgcagctgtccaaggacacctacgacgacgacctggacaacctgctggcccagatcggcgaccagtacgccgacctgttcctggccgccaagaacctgtccgacgccatcctgctgtccgacatcctgcgggtgaacaccgagatcaccaaggcccccctgtccgcctccatgatcaagcggtacgacgagcaccaccaggacctgaccctgctgaaggccctggtgcggcagcagctgcccgagaagtacaaggagatcttcttcgaccagtccaagaacggctacgccggctacatcgacggcggcgcctcccaggaggagttctacaagttcatcaagcccatcctggagaagatggacggcaccgaggagctgctggtgaagctgaaccgggaggacctgctgcggaagcagcggaccttcgacaacggctccatcccccaccagatccacctgggcgagctgcacgccatcctgcggcggcaggaggacttctaccccttcctgaaggacaaccgggagaagatcgagaagatcctgaccttccggatcccctactacgtgggccccctggcccggggcaactcccggttcgcctggatgacccggaagtccgaggagaccatcaccccctggaacttcgaggaggtggtggacaagggcgcctccgcccagtccttcatcgagcggatgaccaacttcgacaagaacctgcccaacgagaaggtgctgcccaagcactccctgctgtacgagtacttcaccgtgtacaacgagctgaccaaggtgaagtacgtgaccgagggcatgcggaagcccgccttcctgtccggcgagcagaagaaggccatcgtggacctgctgttcaagaccaaccggaaggtgaccgtgaagcagctgaaggaggactacttcaagaagatcgagtgcttcgactccgtggagatctccggcgtggaggaccggttcaacgcctccctgggcacctaccacgacctgctgaagatcatcaaggacaaggacttcctggacaacgaggagaacgaggacatcctggaggacatcgtgctgaccctgaccctgttcgaggaccgggagatgatcgaggagcggctgaagacctacgcccacctgttcgacgacaaggtgatgaagcagctgaagcggcggcggtacaccggctggggccggctgtcccggaagctgatcaacggcatccgggacaagcagtccggcaagaccatcctggacttcctgaagtccgacggcttcgccaaccggaacttcatgcagctgatccacgacgactccctgaccttcaaggaggacatccagaaggcccaggtgtccggccagggcgactccctgcacgagcacatcgccaacctggccggctcccccgccatcaagaagggcatcctgcagaccgtgaaggtggtggacgagctggtgaaggtgatgggccggcacaagcccgagaacatcgtgatcgagatggcccgggagaaccagaccacccagaagggccagaagaactcccgggagcggatgaagcggatcgaggagggcatcaaggagctgggctcccagatcctgaaggagcaccccgtggagaacacccagctgcagaacgagaagctgtacctgtactacctgcagaacggccgggacatgtacgtggaccaggagctggacatcaaccggctgtccgactacgacgtggaccacatcgtgccccagtccttcctgaaggacgactccatcgacaacaaggtgctgacccggtccgacaagaaccggggcaagtccgacaacgtgccctccgaggaggtggtgaagaagatgaagaactactggcggcagctgctgaacgccaagctgatcacccagcggaagttcgacaacctgaccaaggccgagcggggcggcctgtccgagctggacaaggccggcttcatcaagcggcagctggtggagacccggcagatcaccaagcacgtggcccagatcctggactcccggatgaacaccaagtacgacgagaacgacaagctgatccgggaggtgaaggtgatcaccctgaagtccaagctggtgtccgacttccggaaggacttccagttctacaaggtgcgggagatcaacaactaccaccacgcccacgacgcctacctgaacgccgtggtgggcaccgccctgatcaagaagtaccccaagctggagtccgagttcgtgtacggcgactacaaggtgtacgacgtgcggaagatgatcgccaagtccgagcaggagatcggcaaggccaccgccaagtacttcttctactccaacatcatgaacttcttcaagaccgagatcaccctggccaacggcgagatccggaagcggcccctgatcgagaccaacggcgagaccggcgagatcgtgtgggacaagggccgggacttcgccaccgtgcggaaggtgctgtccatgccccaggtgaacatcgtgaagaagaccgaggtgcagaccggcggcttctccaaggagtccatcctgcccaagcggaactccgacaagctgatcgcccggaagaaggactgggaccccaagaagtacggcggcttcgactcccccaccgtggcctactccgtgctggtggtggccaaggtggagaagggcaagtccaagaagctgaagtccgtgaaggagctgctgggcatcaccatcatggagcggtcctccttcgagaagaaccccatcgacttcctggaggccaagggctacaaggaggtgaagaaggacctgatcatcaagctgcccaagtactccctgttcgagctggagaacggccggaagcggatgctggcctccgccggcgagctgcagaagggcaacgagctggccctgccctccaagtacgtgaacttcctgtacctggcctcccactacgagaagctgaagggctcccccgaggacaacgagcagaagcagctgttcgtggagcagcacaagcactacctggacgagatcatcgagcagatctccgagttctccaagcgggtgatcctggccgacgccaacctggacaaggtgctgtccgcctacaacaagcaccgggacaagcccatccgggagcaggccgagaacatcatccacctgttcaccctgaccaacctgggcgcccccgccgccttcaagtacttcgacaccaccatcgacaagaagcggtacacctccaccaaggaggtgctggacgccaccctgatccaccagtccatcaccggcctgtacgagacccggatcgacctgtcccagctgggcggcgacggcggcggctcccccaagaagaagcggaaggtggagtagctagcaccagcctcaagaacacccgaatggagtctctaagctacataataccaacttacactttacaaaatgttgtcccccaaaatgtagccattcgtatctgctcctaataaaaagaaagtttcttcacattctctcgagaaaaaaaaaaaatggaaaaaaaaaaaacggaaaaaaaaaaaaggtaaaaaaaaaaaatataaaaaaaaaaaacataaaaaaaaaaaacgaaaaaaaaaaaacgtaaaaaaaaaaaactcaaaaaaaaaaagataaaaaaaaaaaacctaaaaaaaaaaaatgtaaaaaaaaaaaagggaaaaaaaaaaaacgcaaaaaaaaaaaacacaaaaaaaaaaaatgcaaaaaaaaaaaatcgaaaaaaaaaaaatctaaaaaaaaaaaacgaaaaaaaaaaaacccaaaaaaaaaaaagacaaaaaaaaaaaatagaaaaaaaaaaagttaaaaaaaaaaaactgaaaaaaaaaaaatttaaaaaaaaaaaatctag

SEQ ID NO: 27 - RNA, 4266 nt, synthetic construct
  misc_feature 1..4266: note = Synthetic: Spy-R1333K Cas9 Intein (mRNA H) -ORF sequence
  source 1..4266: mol_type = other RNA
atgatcaagatcgccacccggaagtacctgggcaagcagaacgtgtacgacatcggcgtggagcgggaccacaacttcgccctgaagaacggcttcatcgcctccaactgctgggagggctccggcgacaagaagtactccatcggcctggacatcggcaccaactccgtgggctgggccgtgatcaccgacgagtacaaggtgccctccaagaagttcaaggtgctgggcaacaccgaccggcactccatcaagaagaacctgatcggcgccctgctgttcgactccggcgagaccgccgaggccacccggctgaagcggaccgcccggcggcggtacacccggcggaagaaccggatctgctacctgcaggagatcttctccaacgagatggccaaggtggacgactccttcttccaccggctggaggagtccttcctggtggaggaggacaagaagcacgagcggcaccccatcttcggcaacatcgtggacgaggtggcctaccacgagaagtaccccaccatctaccacctgcggaagaagctggtggactccaccgacaaggccgacctgcggctgatctacctggccctggcccacatgatcaagttccggggccacttcctgatcgagggcgacctgaaccccgacaactccgacgtggacaagctgttcatccagctggtgcagacctacaaccagctgttcgaggagaaccccatcaacgcctccggcgtggacgccaaggccatcctgtccgcccggctgtccaagtcccggcggctggagaacctgatcgcccagctgcccggcgagaagaagaacggcctgttcggcaacctgatcgccctgtccctgggcctgacccccaacttcaagtccaacttcgacctggccgaggacgccaagctgcagctgtccaaggacacctacgacgacgacctggacaacctgctggcccagatcggcgaccagtacgccgacctgttcctggccgccaagaacctgtccgacgccatcctgctgtccgacatcctgcgggtgaacaccgagatcaccaaggcccccctgtccgcctccatgatcaagcggtacgacgagcaccaccaggacctgaccctgctgaaggccctggtgcggcagcagctgcccgagaagtacaaggagatcttcttcgaccagtccaagaacggctacgccggctacatcgacggcggcgcctcccaggaggagttctacaagttcatcaagcccatcctggagaagatggacggcaccgaggagctgctggtgaagctgaaccgggaggacctgctgcggaagcagcggaccttcgacaacggctccatcccccaccagatccacctgggcgagctgcacgccatcctgcggcggcaggaggacttctaccccttcctgaaggacaaccgggagaagatcgagaagatcctgaccttccggatcccctactacgtgggccccctggcccggggcaactcccggttcgcctggatgacccggaagtccgaggagaccatcaccccctggaacttcgaggaggtggtggacaagggcgcctccgcccagtccttcatcgagcggatgaccaacttcgacaagaacctgcccaacgagaaggtgctgcccaagcactccctgctgtacgagtacttcaccgtgtacaacgagctgaccaaggtgaagtacgtgaccgagggcatgcggaagcccgccttcctgtccggcgagcagaagaaggccatcgtggacctgctgttcaagaccaaccggaaggtgaccgtgaagcagctgaaggaggactacttcaagaagatcgagtgcttcgactccgtggagatctccggcgtggaggaccggttcaacgcctccctgggcacctaccacgacctgctgaagatcatcaaggacaaggacttcctggacaacgaggagaacgaggacatcctggaggacatcgtgctgaccctgaccctgttcgaggaccgggagatgatcgaggagcggctgaagacctacgcccacctgttcgacgacaaggtgatgaagcagctgaagcggcggcggtacaccggctggggccggctgtcccggaagctgatcaacggcatccgggacaagcagtccggcaagaccatcctggacttcctgaagtccgacggcttcgccaaccggaacttcatgcagctgatccacgacgactccctgaccttcaaggaggacatccagaaggcccaggtgtccggccagggcgactccctgcacgagcacatcgccaacctggccggctcccccgccatcaagaagggcatcctgcagaccgtgaaggtggtggacgagctggtgaaggtgatgggccggcacaagcccgagaacatcgtgatcgagatggcccgggagaaccagaccacccagaagggccagaagaactcccgggagcggatgaagcggatcgaggagggcatcaaggagctgggctcccagatcctgaaggagcaccccgtggagaacacccagctgcagaacgagaagctgtacctgtactacctgcagaacggccgggacatgtacgtggaccaggagctggacatcaaccggctgtccgactacgacgtggaccacatcgtgccccagtccttcctgaaggacgactccatcgacaacaaggtgctgacccggtccgacaagaaccggggcaagtccgacaacgtgccctccgaggaggtggtgaagaagatgaagaactactggcggcagctgctgaacgccaagctgatcacccagcggaagttcgacaacctgaccaaggccgagcggggcggcctgtccgagctggacaaggccggcttcatcaagcggcagctggtggagacccggcagatcaccaagcacgtggcccagatcctggactcccggatgaacaccaagtacgacgagaacgacaagctgatccgggaggtgaaggtgatcaccctgaagtccaagctggtgtccgacttccggaaggacttccagttctacaaggtgcgggagatcaacaactaccaccacgcccacgacgcctacctgaacgccgtggtgggcaccgccctgatcaagaagtaccccaagctggagtccgagttcgtgtacggcgactacaaggtgtacgacgtgcggaagatgatcgccaagtccgagcaggagatcggcaaggccaccgccaagtacttcttctactccaacatcatgaacttcttcaagaccgagatcaccctggccaacggcgagatccggaagcggcccctgatcgagaccaacggcgagaccggcgagatcgtgtgggacaagggccgggacttcgccaccgtgcggaaggtgctgtccatgccccaggtgaacatcgtgaagaagaccgaggtgcagaccggcggcttctccaaggagtccatcctgcccaagcggaactccgacaagctgatcgcccggaagaaggactgggaccccaagaagtacggcggcttcgactcccccaccgtggcctactccgtgctggtggtggccaaggtggagaagggcaagtccaagaagctgaagtccgtgaaggagctgctgggcatcaccatcatggagcggtcctccttcgagaagaaccccatcgacttcctggaggccaagggctacaaggaggtgaagaaggacctgatcatcaagctgcccaagtactccctgttcgagctggagaacggccggaagcggatgctggcctccgccggcgagctgcagaagggcaacgagctggccctgccctccaagtacgtgaacttcctgtacctggcctcccactacgagaagctgaagggctcccccgaggacaacgagcagaagcagctgttcgtggagcagcacaagcactacctggacgagatcatcgagcagatctccgagttctccaagcgggtgatcctggccgacgccaacctggacaaggtgctgtccgcctacaacaagcaccgggacaagcccatccgggagcaggccgagaacatcatccacctgttcaccctgaccaacctgggcgcccccgccgccttcaagtacttcgacaccaccatcgacaagaagcggtacacctccaccaaggaggtgctggacgccaccctgatccaccagtccatcaccggcctgtacgagacccggatcgacctgtcccagctgggcggcgacggcggcggctcccccaagaagaagcggaaggtggagtag

SEQ ID NO: 28 - protein, 1421 aa, synthetic construct
  REGION 1..1421: note = Synthetic: Spy-R1333K Cas9 Intein (mRNA H) -amino acid sequence
MIKIATRKYLGKQNVYDIGVERDHNFALKNGFIASNCWEGSGDKKYSIGLDIGTNSVGWAVITDEYKVPSKKFKVLGNTDRHSIKKNLIGALLFDSGETAEATRLKRTARRRYTRRKNRICYLQEIFSNEMAKVDDSFFHRLEESFLVEEDKKHERHPIFGNIVDEVAYHEKYPTIYHLRKKLVDSTDKADLRLIYLALAHMIKFRGHFLIEGDLNPDNSDVDKLFIQLVQTYNQLFEENPINASGVDAKAILSARLSKSRRLENLIAQLPGEKKNGLFGNLIALSLGLTPNFKSNFDLAEDAKLQLSKDTYDDDLDNLLAQIGDQYADLFLAAKNLSDAILLSDILRVNTEITKAPLSASMIKRYDEHHQDLTLLKALVRQQLPEKYKEIFFDQSKNGYAGYIDGGASQEEFYKFIKPILEKMDGTEELLVKLNREDLLRKQRTFDNGSIPHQIHLGELHAILRRQEDFYPFLKDNREKIEKILTFRIPYYVGPLARGNSRFAWMTRKSEETITPWNFEEVVDKGASAQSFIERMTNFDKNLPNEKVLPKHSLLYEYFTVYNELTKVKYVTEGMRKPAFLSGEQKKAIVDLLFKTNRKVTVKQLKEDYFKKIECFDSVEISGVEDRFNASLGTYHDLLKIIKDKDFLDNEENEDILEDIVLTLTLFEDREMIEERLKTYAHLFDDKVMKQLKRRRYTGWGRLSRKLINGIRDKQSGKTILDFLKSDGFANRNFMQLIHDDSLTFKEDIQKAQVSGQGDSLHEHIANLAGSPAIKKGILQTVKVVDELVKVMGRHKPENIVIEMARENQTTQKGQKNSRERMKRIEEGIKELGSQILKEHPVENTQLQNEKLYLYYLQNGRDMYVDQELDINRLSDYDVDHIVPQSFLKDDSIDNKVLTRSDKNRGKSDNVPSEEVVKKMKNYWRQLLNAKLITQRKFDNLTKAERGGLSELDKAGFIKRQLVETRQITKHVAQILDSRMNTKYDENDKLIREVKVITLKSKLVSDFRKDFQFYKVREINNYHHAHDAYLNAVVGTALIKKYPKLESEFVYGDYKVYDVRKMIAKSEQEIGKATAKYFFYSNIMNFFKTEITLANGEIRKRPLIETNGETGEIVWDKGRDFATVRKVLSMPQVNIVKKTEVQTGGFSKESILPKRNSDKLIARKKDWDPKKYGGFDSPTVAYSVLVVAKVEKGKSKKLKSVKELLGITIMERSSFEKNPIDFLEAKGYKEVKKDLIIKLPKYSLFELENGRKRMLASAGELQKGNELALPSKYVNFLYLASHYEKLKGSPEDNEQKQLFVEQHKHYLDEIIEQISEFSKRVILADANLDKVLSAYNKHRDKPIREQAENIIHLFTLTNLGAPAAFKYFDTTIDKKRYTSTKEVLDATLIHQSITGLYETRIDLSQLGGDGGGSPKKKRKVE

SEQ ID NO: 29 - RNA, 5031 nt, synthetic construct
  misc_feature 1..5031: note = Synthetic: Spy-R1333K Cas9 Intein (mRNA I) -mRNA sequence
  source 1..5031: mol_type = other RNA
gggaagctcagaataaacgctcaactttggccggatctgccaccatggacggctccggcggcggctcccccaagaagaagcggaaggtgggctccggcgacaagaagtactccatcggcctggacatcggcaccaactccgtgggctgggccgtgatcaccgacgagtacaaggtgccctccaagaagttcaaggtgctgggcaacaccgaccggcactccatcaagaagaacctgatcggcgccctgctgttcgactccggcgagaccgccgaggccacccggctgaagcggaccgcccggcggcggtacacccggcggaagaaccggatctgctacctgcaggagatcttctccaacgagatggccaaggtggacgactccttcttccaccggctggaggagtccttcctggtggaggaggacaagaagcacgagcggcaccccatcttcggcaacatcgtggacgaggtggcctaccacgagaagtaccccaccatctaccacctgcggaagaagctggtggactccaccgacaaggccgacctgcggctgatctacctggccctggcccacatgatcaagttccggggccacttcctgatcgagggcgacctgaaccccgacaactccgacgtggacaagctgttcatccagctggtgcagacctacaaccagctgttcgaggagaaccccatcaacgcctccggcgtggacgccaaggccatcctgtccgcccggctgtccaagtcccggcggctggagaacctgatcgcccagctgcccggcgagaagaagaacggcctgttcggcaacctgatcgccctgtccctgggcctgacccccaacttcaagtccaacttcgacctggccgaggacgccaagctgcagctgtccaaggacacctacgacgacgacctggacaacctgctggcccagatcggcgaccagtacgccgacctgttcctggccgccaagaacctgtccgacgccatcctgctgtccgacatcctgcgggtgaacaccgagatcaccaaggcccccctgtccgcctccatgatcaagcggtacgacgagcaccaccaggacctgaccctgctgaaggccctggtgcggcagcagctgcccgagaagtacaaggagatcttcttcgaccagtccaagaacggctacgccggctacatcgacggcggcgcctcccaggaggagttctacaagttcatcaagcccatcctggagaagatggacggcaccgaggagctgctggtgaagctgaaccgggaggacctgctgcggaagcagcggaccttcgacaacggctccatcccccaccagatccacctgggcgagctgcacgccatcctgcggcggcaggaggacttctaccccttcctgaaggacaaccgggagaagatcgagaagatcctgaccttccggatcccctactacgtgggccccctggcccggggcaactcccggttcgcctggatgacccggaagtccgaggagaccatcaccccctggaacttcgaggaggtggtggacaagggcgcctccgcccagtccttcatcgagcggatgaccaacttcgacaagaacctgcccaacgagaaggtgctgcccaagcactccctgctgtacgagtacttcaccgtgtacaacgagctgaccaaggtgaagtacgtgaccgagggcatgcggaagcccgccttcctgtccggcgagcagaagaaggccatcgtggacctgctgttcaagaccaaccggaaggtgaccgtgaagcagctgaaggaggactacttcaagaagatcgagtgcttcgactccgtggagatctccggcgtggaggaccggttcaacgcctccctgggcacctaccacgacctgctgaagatcatcaaggacaaggacttcctggacaacgaggagaacgaggacatcctggaggacatcgtgctgaccctgaccctgttcgaggaccgggagatgatcgaggagcggctgaagacctacgcccacctgttcgacgacaaggtgatgaagcagctgaagcggcggcggtacaccggctggggccggctgtcccggaagctgatcaacggcatccgggacaagcagtccggcaagaccatcctggacttcctgaagtccgacggcttcgccaaccggaacttcatgcagctgatccacgacgactccctgaccttcaaggaggacatccagaaggcccaggtgtccggccagggcgactccctgcacgagcacatcgccaacctggccggctcccccgccatcaagaagggcatcctgcagaccgtgaaggtggtggacgagctggtgaaggtgatgggccggcacaagcccgagaacatcgtgatcgagatggcccgggagaaccagaccacccagaagggccagaagaactcccgggagcggatgaagcggatcgaggagggcatcaaggagctgggctcccagatcctgaaggagcaccccgtggagaacacccagctgcagaacgagaagctgtacctgtactacctgcagaacggccgggacatgtacgtggaccaggagctggacatcaaccggctgtccgactacgacgtggaccacatcgtgccccagtccttcctgaaggacgactccatcgacaacaaggtgctgacccggtccgacaagaaccggggcaagtccgacaacgtgccctccgaggaggtggtgaagaagatgaagaactactggcggcagctgctgaacgccaagctgatcacccagcggaagttcgacaacctgaccaaggccgagcggggcggcctgtccgagctggacaaggccggcttcatcaagcggcagctggtggagacccggcagatcaccaagcacgtggcccagatcctggactcccggatgaacaccaagtacgacgagaacgacaagctgatccgggaggtgaaggtgatcaccctgaagtccaagctggtgtccgacttccggaaggacttccagttctacaaggtgcgggagatcaacaactaccaccacgcccacgacgcctacctgaacgccgtggtgggcaccgccctgatcaagaagtaccccaagctggagtccgagttcgtgtacggcgactacaaggtgtacgacgtgcggaagatgatcgccaagtccgagcaggagatcggcaaggccaccgccaagtacttcttctactccaacatcatgaacttcttcaagaccgagatcaccctggccaacggcgagatccggaagcggcccctgatcgagaccaacggcgagaccggcgagatcgtgtgggacaagggccgggacttcgccaccgtgcggaaggtgctgtccatgccccaggtgaacatcgtgaagaagaccgaggtgcagaccggcggcttctccaaggagtccatcctgcccaagcggaactccgacaagctgatcgcccggaagaaggactgggaccccaagaagtacggcggcttcgactcccccaccgtggcctactccgtgctggtggtggccaaggtggagaagggcaagtccaagaagctgaagtccgtgaaggagctgctgggcatcaccatcatggagcggtcctccttcgagaagaaccccatcgacttcctggaggccaagggctacaaggaggtgaagaaggacctgatcatcaagctgcccaagtactccctgttcgagctggagaacggccggaagcggatgctggcctccgccggcgagctgcagaagggcaacgagctggccctgccctccaagtacgtgaacttcctgtacctggcctcccactacgagaagctgaagggctcccccgaggacaacgagcagaagcagctgttcgtggagcagcacaagcactacctggacgagatcatcgagcagatctccgagttctccaagcgggtgatcctggccgacgccaacctggacaaggtgctgtccgcctacaacaagcaccgggacaagcccatccgggagcaggccgagaacatcatccacctgttcaccctgaccaacctgggcgcccccgccgccttcaagtacttcgacaccaccatcgacaagaagcggtacacctccaccaaggaggtgctggacgccaccctgatccaccagtccatcaccggcctgtacgagacccggatcgacctgtcccagctgggcggcgaccggggcaagtgcctgtcctacgagaccgagatcctgaccgtggagtacggcctgctgcccatcgtggtggtggtggagaagcggatcgagtgcaccgtgtactccgtggacaacaacggcaacatctacacccagcccgtggcccagtggcacgaccggggcgagcaggaggtgttcgagtactgcctggaggacggctccctgatccgggccaccaaggaccacaagttcatgaccgtggacggccagatgctgcccatcgacgagatcttcgagcgggagctggacctgatgcgggtggacaacctgcccaactagctagcaccagcctcaagaacacccgaatggagtctctaagctacataataccaacttacactttacaaaatgttgtcccccaaaatgtagccattcgtatctgctcctaataaaaagaaagtttcttcacattctctcgagaaaaaaaaaaaatggaaaaaaaaaaaacggaaaaaaaaaaaaggtaaaaaaaaaaaatataaaaaaaaaaaacataaaaaaaaaaaacgaaaaaaaaaaaacgtaaaaaaaaaaaactcaaaaaaaaaaagataaaaaaaaaaaacctaaaaaaaaaaaatgtaaaaaaaaaaaagggaaaaaaaaaaaacgcaaaaaaaaaaaacacaaaaaaaaaaaatgcaaaaaaaaaaaatcgaaaaaaaaaaaatctaaaaaaaaaaaacgaaaaaaaaaaaacccaaaaaaaaaaaagacaaaaaaaaaaaatagaaaaaaaaaaagttaaaaaaaaaaaactgaaaaaaaaaaaatttaaaaaaaaaaaatctag

SEQ ID NO: 30 - RNA, 4473 nt, synthetic construct
  misc_feature 1..4473: note = Synthetic: Spy-R1333K Cas9 Intein (mRNA I) -ORF sequence
  source 1..4473: mol_type = other RNA
atggacggctccggcggcggctcccccaagaagaagcggaaggtgggctccggcgacaagaagtactccatcggcctggacatcggcaccaactccgtgggctgggccgtgatcaccgacgagtacaaggtgccctccaagaagttcaaggtgctgggcaacaccgaccggcactccatcaagaagaacctgatcggcgccctgctgttcgactccggcgagaccgccgaggccacccggctgaagcggaccgcccggcggcggtacacccggcggaagaaccggatctgctacctgcaggagatcttctccaacgagatggccaaggtggacgactccttcttccaccggctggaggagtccttcctggtggaggaggacaagaagcacgagcggcaccccatcttcggcaacatcgtggacgaggtggcctaccacgagaagtaccccaccatctaccacctgcggaagaagctggtggactccaccgacaaggccgacctgcggctgatctacctggccctggcccacatgatcaagttccggggccacttcctgatcgagggcgacctgaaccccgacaactccgacgtggacaagctgttcatccagctggtgcagacctacaaccagctgttcgaggagaaccccatcaacgcctccggcgtggacgccaaggccatcctgtccgcccggctgtccaagtcccggcggctggagaacctgatcgcccagctgcccggcgagaagaagaacggcctgttcggcaacctgatcgccctgtccctgggcctgacccccaacttcaagtccaacttcgacctggccgaggacgccaagctgcagctgtccaaggacacctacgacgacgacctggacaacctgctggcccagatcggcgaccagtacgccgacctgttcctggccgccaagaacctgtccgacgccatcctgctgtccgacatcctgcgggtgaacaccgagatcaccaaggcccccctgtccgcctccatgatcaagcggtacgacgagcaccaccaggacctgaccctgctgaaggccctggtgcggcagcagctgcccgagaagtacaaggagatcttcttcgaccagtccaagaacggctacgccggctacatcgacggcggcgcctcccaggaggagttctacaagttcatcaagcccatcctggagaagatggacggcaccgaggagctgctggtgaagctgaaccgggaggacctgctgcggaagcagcggaccttcgacaacggctccatcccccaccagatccacctgggcgagctgcacgccatcctgcggcggcaggaggacttctaccccttcctgaaggacaaccgggagaagatcgagaagatcctgaccttccggatcccctactacgtgggccccctggcccggggcaactcccggttcgcctggatgacccggaagtccgaggagaccatcaccccctggaacttcgaggaggtggtggacaagggcgcctccgcccagtccttcatcgagcggatgaccaacttcgacaagaacctgcccaacgagaaggtgctgcccaagcactccctgctgtacgagtacttcaccgtgtacaacgagctgaccaaggtgaagtacgtgaccgagggcatgcggaagcccgccttcctgtccggcgagcagaagaaggccatcgtggacctgctgttcaagaccaaccggaaggtgaccgtgaagcagctgaaggaggactacttcaagaagatcgagtgcttcgactccgtggagatctccggcgtggaggaccggttcaacgcctccctgggcacctaccacgacctgctgaagatcatcaaggacaaggacttcctggacaacgaggagaacgaggacatcctggaggacatcgtgctgaccctgaccctgttcgaggaccgggagatgatcgaggagcggctgaagacctacgcccacctgttcgacgacaaggtgatgaagcagctgaagcggcggcggtacaccggctggggccggctgtcccggaagctgatcaacggcatccgggacaagcagtccggcaagaccatcctggacttcctgaagtccgacggcttcgccaaccggaacttcatgcagctgatccacgacgactccctgaccttcaaggaggacatccagaaggcccaggtgtccggccagggcgactccctgcacgagcacatcgccaacctggccggctcccccgccatcaagaagggcatcctgcagaccgtgaaggtggtggacgagctggtgaaggtgatgggccggcacaagcccgagaacatcgtgatcgagatggcccgggagaaccagaccacccagaagggccagaagaactcccgggagcggatgaagcggatcgaggagggcatcaaggagctgggctcccagatcctgaaggagcaccccgtggagaacacccagctgcagaacgagaagctgtacctgtactacctgcagaacggccgggacatgtacgtggaccaggagctggacatcaaccggctgtccgactacgacgtggaccacatcgtgccccagtccttcctgaaggacgactccatcgacaacaaggtgctgacccggtccgacaagaaccggggcaagtccgacaacgtgccctccgaggaggtggtgaagaagatgaagaactactggcggcagctgctgaacgccaagctgatcacccagcggaagttcgacaacctgaccaaggccgagcggggcggcctgtccgagctggacaaggccggcttcatcaagcggcagctggtggagacccggcagatcaccaagcacgtggcccagatcctggactcccggatgaacaccaagtacgacgagaacgacaagctgatccgggaggtgaaggtgatcaccctgaagtccaagctggtgtccgacttccggaaggacttccagttctacaaggtgcgggagatcaacaactaccaccacgcccacgacgcctacctgaacgccgtggtgggcaccgccctgatcaagaagtaccccaagctggagtccgagttcgtgtacggcgactacaaggtgtacgacgtgcggaagatgatcgccaagtccgagcaggagatcggcaaggccaccgccaagtacttcttctactccaacatcatgaacttcttcaagaccgagatcaccctggccaacggcgagatccggaagcggcccctgatcgagaccaacggcgagaccggcgagatcgtgtgggacaagggccgggacttcgccaccgtgcggaaggtgctgtccatgccccaggtgaacatcgtgaagaagaccgaggtgcagaccggcggcttctccaaggagtccatcctgcccaagcggaactccgacaagctgatcgcccggaagaaggactgggaccccaagaagtacggcggcttcgactcccccaccgtggcctactccgtgctggtggtggccaaggtggagaagggcaagtccaagaagctgaagtccgtgaaggagctgctgggcatcaccatcatggagcggtcctccttcgagaagaaccccatcgacttcctggaggccaagggctacaaggaggtgaagaaggacctgatcatcaagctgcccaagtactccctgttcgagctggagaacggccggaagcggatgctggcctccgccggcgagctgcagaagggcaacgagctggccctgccctccaagtacgtgaacttcctgtacctggcctcccactacgagaagctgaagggctcccccgaggacaacgagcagaagcagctgttcgtggagcagcacaagcactacctggacgagatcatcgagcagatctccgagttctccaagcgggtgatcctggccgacgccaacctggacaaggtgctgtccgcctacaacaagcaccgggacaagcccatccgggagcaggccgagaacatcatccacctgttcaccctgaccaacctgggcgcccccgccgccttcaagtacttcgacaccaccatcgacaagaagcggtacacctccaccaaggaggtgctggacgccaccctgatccaccagtccatcaccggcctgtacgagacccggatcgacctgtcccagctgggcggcgaccggggcaagtgcctgtcctacgagaccgagatcctgaccgtggagtacggcctgctgcccatcgtggtggtggtggagaagcggatcgagtgcaccgtgtactccgtggacaacaacggcaacatctacacccagcccgtggcccagtggcacgaccggggcgagcaggaggtgttcgagtactgcctggaggacggctccctgatccgggccaccaaggaccacaagttcatgaccgtggacggccagatgctgcccatcgacgagatcttcgagcgggagctggacctgatgcgggtggacaacctgcccaactag

SEQ ID NO: 31 - protein, 1490 aa, synthetic construct
  REGION 1..1490: note = Synthetic: Spy-R1333K Cas9 Intein (mRNA I) -amino acid sequence
MDGSGGGSPKKKRKVGSGDKKYSIGLDIGTNSVGWAVITDEYKVPSKKFKVLGNTDRHSIKKNLIGALLFDSGETAEATRLKRTARRRYTRRKNRICYLQEIFSNEMAKVDDSFFHRLEESFLVEEDKKHERHPIFGNIVDEVAYHEKYPTIYHLRKKLVDSTDKADLRLIYLALAHMIKFRGHFLIEGDLNPDNSDVDKLFIQLVQTYNQLFEENPINASGVDAKAILSARLSKSRRLENLIAQLPGEKKNGLFGNLIALSLGLTPNFKSNFDLAEDAKLQLSKDTYDDDLDNLLAQIGDQYADLFLAAKNLSDAILLSDILRVNTEITKAPLSASMIKRYDEHHQDLTLLKALVRQQLPEKYKEIFFDQSKNGYAGYIDGGASQEEFYKFIKPILEKMDGTEELLVKLNREDLLRKQRTFDNGSIPHQIHLGELHAILRRQEDFYPFLKDNREKIEKILTFRIPYYVGPLARGNSRFAWMTRKSEETITPWNFEEVVDKGASAQSFIERMTNFDKNLPNEKVLPKHSLLYEYFTVYNELTKVKYVTEGMRKPAFLSGEQKKAIVDLLFKTNRKVTVKQLKEDYFKKIECFDSVEISGVEDRFNASLGTYHDLLKIIKDKDFLDNEENEDILEDIVLTLTLFEDREMIEERLKTYAHLFDDKVMKQLKRRRYTGWGRLSRKLINGIRDKQSGKTILDFLKSDGFANRNFMQLIHDDSLTFKEDIQKAQVSGQGDSLHEHIANLAGSPAIKKGILQTVKVVDELVKVMGRHKPENIVIEMARENQTTQKGQKNSRERMKRIEEGIKELGSQILKEHPVENTQLQNEKLYLYYLQNGRDMYVDQELDINRLSDYDVDHIVPQSFLKDDSIDNKVLTRSDKNRGKSDNVPSEEVVKKMKNYWRQLLNAKLITQRKFDNLTKAERGGLSELDKAGFIKRQLVETRQITKHVAQILDSRMNTKYDENDKLIREVKVITLKSKLVSDFRKDFQFYKVREINNYHHAHDAYLNAVVGTALIKKYPKLESEFVYGDYKVYDVRKMIAKSEQEIGKATAKYFFYSNIMNFFKTEITLANGEIRKRPLIETNGETGEIVWDKGRDFATVRKVLSMPQVNIVKKTEVQTGGFSKESILPKRNSDKLIARKKDWDPKKYGGFDSPTVAYSVLVVAKVEKGKSKKLKSVKELLGITIMERSSFEKNPIDFLEAKGYKEVKKDLIIKLPKYSLFELENGRKRMLASAGELQKGNELALPSKYVNFLYLASHYEKLKGSPEDNEQKQLFVEQHKHYLDEIIEQISEFSKRVILADANLDKVLSAYNKHRDKPIREQAENIIHLFTLTNLGAPAAFKYFDTTIDKKRYTSTKEVLDATLIHQSITGLYETRIDLSQLGGDRGKCLSYETEILTVEYGLLPIVVVVEKRIECTVYSVDNNGNIYTQPVAQWHDRGEQEVFEYCLEDGSLIRATKDHKFMTVDGQMLPIDEIFERELDLMRVDNLPN

SEQ ID NO: 32 - RNA, 4230 nt, synthetic construct
  misc_feature 1..4230: note = Synthetic: Nme2 Cas9 Intein (mRNA J) - mRNA sequence
  source 1..4230: mol_type = other RNA
gggaagctcagaataaacgctcaactttggccggatctgccaccatgatcaagatcgccacccggaagtacctgggcaagcagaacgtgtacgacatcggcgtggagcgggaccacaacttcgccctgaagaacggcttcatcgcctccaactgctgggagggcgcccccgagtccgccaccgagtccggcggcacctccaccgagtccgagggctccgccggcacctccaccgagtccgagggctccgccggctccgccggctccacctccggcggctccggcggcggctccggcggctccggctccgccggcacctccaccgagtccgagggctccgccggcacctccgagtccgccaccgagtccggcggcacctccaccgagtccgagggctcctcctccggcgccgccttcaagcccaaccccatcaactacatcctgggcctggacatcggcatcgcctccgtgggctgggccatggtggagatcgacgaggaggagaaccccatccggctgatcgacctgggcgtgcgggtgttcgagcgggccgaggtgcccaagaccggcgactccctggccatggcccggcggctggcccggtccgtgcggcggctgacccggcggcgggcccaccggctgctgcgggcccggcggctgctgaagcgggagggcgtgctgcaggccgccgacttcgacgagaacggcctgatcaagtccctgcccaacaccccctggcagctgcgggccgccgccctggaccggaagctgacccccctggagtggtccgccgtgctgctgcacctgatcaagcaccggggctacctgtcccagcggaagaacgagggcgagaccgccgacaaggagctgggcgccctgctgaagggcgtggccaacaacgcccacgccctgcagaccggcgacttccggacccccgccgagctggccctgaacaagttcgagaaggagtccggccacatccggaaccagcggggcgactactcccacaccttctcccggaaggacctgcaggccgagctgatcctgctgttcgagaagcagaaggagttcggcaacccccacgtgtccggcggcctgaaggagggcatcgagaccctgctgatgacccagcggcccgccctgtccggcgacgccgtgcagaagatgctgggccactgcaccttcgagcccgccgagcccaaggccgccaagaacacctacaccgccgagcggttcatctggctgaccaagctgaacaacctgcggatcctggagcagggctccgagcggcccctgaccgacaccgagcgggccaccctgatggacgagccctaccggaagtccaagctgacctacgcccaggcccggaagctgctgggcctggaggacaccgccttcttcaagggcctgcggtacggcaaggacaacgccgaggcctccaccctgatggagatgaaggcctaccacgccatctcccgggccctggagaaggagggcctgaaggacaagaagtcccccctgaacctgtcctccgagctgcaggacgagatcggcaccgccttctccctgttcaagaccgacgaggacatcaccggccggctgaaggaccgggtgcagcccgagatcctggaggccctgctgaagcacatctccttcgacaagttcgtgcagatctccctgaaggccctgcggcggatcgtgcccctgatggagcagggcaagcggtacgacgaggcctgcgccgagatctacggcgaccactacggcaagaagaacaccgaggagaagatctacctgccccccatccccgccgacgagatccggaaccccgtggtgctgcgggccctgtcccaggcccggaaggtgatcaacggcgtggtgcggcggtacggctcccccgcccggatccacatcgagaccgcccgggaggtgggcaagtccttcaaggaccggaaggagatcgagaagcggcaggaggagaaccggaaggaccgggagaaggccgccgccaagttccgggagtacttccccaacttcgtgggcgagcccaagtccaaggacatcctgaagctgcggctgtacgagcagcagcacggcaagtgcctgtactccggcaaggagatcaacctggtgcggctgaacgagaagggctacgtggagatcgaccacgccctgcccttctcccggacctgggacgactccttcaacaacaaggtgctggtgctgggctccgagaaccagaacaagggcaaccagaccccctacgagtacttcaacggcaaggacaactcccgggagtggcaggagttcaaggcccgggtggagacctcccggttcccccggtccaagaagcagcggatcctgctgcagaagttcgacgaggacggcttcaaggagtgcaacctgaacgacacccggtacgtgaaccggttcctgtgccagttcgtggccgaccacatcctgctgaccggcaagggcaagcggcgggtgttcgcctccaacggccagatcaccaacctgctgcggggcttctggggcctgcggaaggtgcgggccgagaacgaccggcaccacgccctggacgccgtggtggtggcctgctccaccgtggccatgcagcagaagatcacccggttcgtgcggtacaaggagatgaacgccttcgacggcaagaccatcgacaaggagaccggcaaggtgctgcaccagaagacccacttcccccagccctgggagttcttcgcccaggaggtgatgatccgggtgttcggcaagcccgacggcaagcccgagttcgaggaggccgacacccccgagaagctgcggaccctgctggccgagaagctgtcctcccggcccgaggccgtgcacgagtacgtgacccccctgttcgtgtcccgggcccccaaccggaagatgtccggcgcccacaaggacaccctgcggtccgccaagcggttcgtgaagcacaacgagaagatctccgtgaagcgggtgtggctgaccgagatcaagctggccgacctggagaacatggtgaactacaagaacggccgggagatcgagctgtacgaggccctgaaggcccggctggaggcctacggcggcaacgccaagcaggccttcgaccccaaggacaaccccttctacaagaagggcggccagctggtgaaggccgtgcgggtggagaagacccaggagtccggcgtgctgctgaacaagaagaacgcctacaccatcgccgacaacggcgacatggtgcgggtggacgtgttctgcaaggtggacaagaagggcaagaaccagtacttcatcgtgcccatctacgcctggcaggtggccgagaacatcctgcccgacatcgactgcaagggctaccggatcgacgactcctacaccttctgcttctccctgcacaagtacgacctgatcgccttccagaaggacgagaagtccaaggtggagttcgcctactacatcaactgcgactcctccaacggccggttctacctggcctggcacgacaagggctccaaggagcagcagttccggatctccacccagaacctggtgctgatccagaagtaccaggtgaacgagctgggcaaggagatccggccctgccggctgaagaagcggccccccgtgcggtccggcaagcggaccgccgacggctccggcggcggctcccccaagaagaagcggaaggtggagtagctagcaccagcctcaagaacacccgaatggagtctctaagctacataataccaacttacactttacaaaatgttgtcccccaaaatgtagccattcgtatctgctcctaataaaaagaaagtttcttcacattctctcgagaaaaaaaaaaaatggaaaaaaaaaaaacggaaaaaaaaaaaaggtaaaaaaaaaaaatataaaaaaaaaaaacataaaaaaaaaaaacgaaaaaaaaaaaacgtaaaaaaaaaaaactcaaaaaaaaaaagataaaaaaaaaaaacctaaaaaaaaaaaatgtaaaaaaaaaaaagggaaaaaaaaaaaacgcaaaaaaaaaaaacacaaaaaaaaaaaatgcaaaaaaaaaaaatcgaaaaaaaaaaaatctaaaaaaaaaaaacgaaaaaaaaaaaacccaaaaaaaaaaaagacaaaaaaaaaaaatagaaaaaaaaaaagttaaaaaaaaaaaactgaaaaaaaaaaaatttaaaaaaaaaaaatctag

SEQ ID NO: 33 - RNA, 3672 nt, synthetic construct
  misc_feature 1..3672: note = Synthetic: Nme2 Cas9 Intein (mRNA J) - ORF sequence
  source 1..3672: mol_type = other RNA
atgatcaagatcgccacccggaagtacctgggcaagcagaacgtgtacgacatcggcgtggagcgggaccacaacttcgccctgaagaacggcttcatcgcctccaactgctgggagggcgcccccgagtccgccaccgagtccggcggcacctccaccgagtccgagggctccgccggcacctccaccgagtccgagggctccgccggctccgccggctccacctccggcggctccggcggcggctccggcggctccggctccgccggcacctccaccgagtccgagggctccgccggcacctccgagtccgccaccgagtccggcggcacctccaccgagtccgagggctcctcctccggcgccgccttcaagcccaaccccatcaactacatcctgggcctggacatcggcatcgcctccgtgggctgggccatggtggagatcgacgaggaggagaaccccatccggctgatcgacctgggcgtgcgggtgttcgagcgggccgaggtgcccaagaccggcgactccctggccatggcccggcggctggcccggtccgtgcggcggctgacccggcggcgggcccaccggctgctgcgggcccggcggctgctgaagcgggagggcgtgctgcaggccgccgacttcgacgagaacggcctgatcaagtccctgcccaacaccccctggcagctgcgggccgccgccctggaccggaagctgacccccctggagtggtccgccgtgctgctgcacctgatcaagcaccggggctacctgtcccagcggaagaacgagggcgagaccgccgacaaggagctgggcgccctgctgaagggcgtggccaacaacgcccacgccctgcagaccggcgacttccggacccccgccgagctggccctgaacaagttcgagaaggagtccggccacatccggaaccagcggggcgactactcccacaccttctcccggaaggacctgcaggccgagctgatcctgctgttcgagaagcagaaggagttcggcaacccccacgtgtccggcggcctgaaggagggcatcgagaccctgctgatgacccagcggcccgccctgtccggcgacgccgtgcagaagatgctgggccactgcaccttcgagcccgccgagcccaaggccgccaagaacacctacaccgccgagcggttcatctggctgaccaagctgaacaacctgcggatcctggagcagggctccgagcggcccctgaccgacaccgagcgggccaccctgatggacgagccctaccggaagtccaagctgacctacgcccaggcccggaagctgctgggcctggaggacaccgccttcttcaagggcctgcggtacggcaaggacaacgccgaggcctccaccctgatggagatgaaggcctaccacgccatctcccgggccctggagaaggagggcctgaaggacaagaagtcccccctgaacctgtcctccgagctgcaggacgagatcggcaccgccttctccctgttcaagaccgacgaggacatcaccggccggctgaaggaccgggtgcagcccgagatcctggaggccctgctgaagcacatctccttcgacaagttcgtgcagatctccctgaaggccctgcggcggatcgtgcccctgatggagcagggcaagcggtacgacgaggcctgcgccgagatctacggcgaccactacggcaagaagaacaccgaggagaagatctacctgccccccatccccgccgacgagatccggaaccccgtggtgctgcgggccctgtcccaggcccggaaggtgatcaacggcgtggtgcggcggtacggctcccccgcccggatccacatcgagaccgcccgggaggtgggcaagtccttcaaggaccggaaggagatcgagaagcggcaggaggagaaccggaaggaccgggagaaggccgccgccaagttccgggagtacttccccaacttcgtgggcgagcccaagtccaaggacatcctgaagctgcggctgtacgagcagcagcacggcaagtgcctgtactccggcaaggagatcaacctggtgcggctgaacgagaagggctacgtggagatcgaccacgccctgcccttctcccggacctgggacgactccttcaacaacaaggtgctggtgctgggctccgagaaccagaacaagggcaaccagaccccctacgagtacttcaacggcaaggacaactcccgggagtggcaggagttcaaggcccgggtggagacctcccggttcccccggtccaagaagcagcggatcctgctgcagaagttcgacgaggacggcttcaaggagtgcaacctgaacgacacccggtacgtgaaccggttcctgtgccagttcgtggccgaccacatcctgctgaccggcaagggcaagcggcgggtgttcgcctccaacggccagatcaccaacctgctgcggggcttctggggcctgcggaaggtgcgggccgagaacgaccggcaccacgccctggacgccgtggtggtggcctgctccaccgtggccatgcagcagaagatcacccggttcgtgcggtacaaggagatgaacgccttcgacggcaagaccatcgacaaggagaccggcaaggtgctgcaccagaagacccacttcccccagccctgggagttcttcgcccaggaggtgatgatccgggtgttcggcaagcccgacggcaagcccgagttcgaggaggccgacacccccgagaagctgcggaccctgctggccgagaagctgtcctcccggcccgaggccgtgcacgagtacgtgacccccctgttcgtgtcccgggcccccaaccggaagatgtccggcgcccacaaggacaccctgcggtccgccaagcggttcgtgaagcacaacgagaagatctccgtgaagcgggtgtggctgaccgagatcaagctggccgacctggagaacatggtgaactacaagaacggccgggagatcgagctgtacgaggccctgaaggcccggctggaggcctacggcggcaacgccaagcaggccttcgaccccaaggacaaccccttctacaagaagggcggccagctggtgaaggccgtgcgggtggagaagacccaggagtccggcgtgctgctgaacaagaagaacgcctacaccatcgccgacaacggcgacatggtgcgggtggacgtgttctgcaaggtggacaagaagggcaagaaccagtacttcatcgtgcccatctacgcctggcaggtggccgagaacatcctgcccgacatcgactgcaagggctaccggatcgacgactcctacaccttctgcttctccctgcacaagtacgacctgatcgccttccagaaggacgagaagtccaaggtggagttcgcctactacatcaactgcgactcctccaacggccggttctacctggcctggcacgacaagggctccaaggagcagcagttccggatctccacccagaacctggtgctgatccagaagtaccaggtgaacgagctgggcaaggagatccggccctgccggctgaagaagcggccccccgtgcggtccggcaagcggaccgccgacggctccggcggcggctcccccaagaagaagcggaaggtggagtag

SEQ ID NO: 34 - protein, 1223 aa, synthetic construct
  REGION 1..1223: note = Synthetic: Nme2 Cas9 Intein (mRNA J) - amino acid sequence
MIKIATRKYLGKQNVYDIGVERDHNFALKNGFIASNCWEGAPESATESGGTSTESEGSAGTSTESEGSAGSAGSTSGGSGGGSGGSGSAGTSTESEGSAGTSESATESGGTSTESEGSSSGAAFKPNPINYILGLDIGIASVGWAMVEIDEEENPIRLIDLGVRVFERAEVPKTGDSLAMARRLARSVRRLTRRRAHRLLRARRLLKREGVLQAADFDENGLIKSLPNTPWQLRAAALDRKLTPLEWSAVLLHLIKHRGYLSQRKNEGETADKELGALLKGVANNAHALQTGDFRTPAELALNKFEKESGHIRNQRGDYSHTFSRKDLQAELILLFEKQKEFGNPHVSGGLKEGIETLLMTQRPALSGDAVQKMLGHCTFEPAEPKAAKNTYTAERFIWLTKLNNLRILEQGSERPLTDTERATLMDEPYRKSKLTYAQARKLLGLEDTAFFKGLRYGKDNAEASTLMEMKAYHAISRALEKEGLKDKKSPLNLSSELQDEIGTAFSLFKTDEDITGRLKDRVQPEILEALLKHISFDKFVQISLKALRRIVPLMEQGKRYDEACAEIYGDHYGKKNTEEKIYLPPIPADEIRNPVVLRALSQARKVINGVVRRYGSPARIHIETAREVGKSFKDRKEIEKRQEENRKDREKAAAKFREYFPNFVGEPKSKDILKLRLYEQQHGKCLYSGKEINLVRLNEKGYVEIDHALPFSRTWDDSFNNKVLVLGSENQNKGNQTPYEYFNGKDNSREWQEFKARVETSRFPRSKKQRILLQKFDEDGFKECNLNDTRYVNRFLCQFVADHILLTGKGKRRVFASNGQITNLLRGFWGLRKVRAENDRHHALDAVVVACSTVAMQQKITRFVRYKEMNAFDGKTIDKETGKVLHQKTHFPQPWEFFAQEVMIRVFGKPDGKPEFEEADTPEKLRTLLAEKLSSRPEAVHEYVTPLFVSRAPNRKMSGAHKDTLRSAKRFVKHNEKISVKRVWLTEIKLADLENMVNYKNGREIELYEALKARLEAYGGNAKQAFDPKDNPFYKKGGQLVKAVRVEKTQESGVLLNKKNAYTIADNGDMVRVDVFCKVDKKGKNQYFIVPIYAWQVAENILPDIDCKGYRIDDSYTFCFSLHKYDLIAFQKDEKSKVEFAYYINCDSSNGRFYLAWHDKGSKEQQFRISTQNLVLIQKYQVNELGKEIRPCRLKKRPPVRSGKRTADGSGGGSPKKKRKVE

SEQ ID NO: 35 - RNA, 4480 nt, synthetic construct
  misc_feature 1..4480: note = Synthetic: SpyCas9 with HiBit tag (mRNA K) -mRNA sequence
  source 1..4480: mol_type = other RNA
gggaagctcagaataaacgctcaactttggccggatctgccaccatggacaagaagtactccatcggcctggacatcggcaccaactccgtgggctgggccgtgatcaccgacgagtacaaggtgccctccaagaagttcaaggtgctgggcaacaccgaccggcactccatcaagaagaacctgatcggcgccctgctgttcgactccggcgagaccgccgaggccacccggctgaagcggaccgcccggcggcggtacacccggcggaagaaccggatctgctacctgcaggagatcttctccaacgagatggccaaggtggacgactccttcttccaccggctggaggagtccttcctggtggaggaggacaagaagcacgagcggcaccccatcttcggcaacatcgtggacgaggtggcctaccacgagaagtaccccaccatctaccacctgcggaagaagctggtggactccaccgacaaggccgacctgcggctgatctacctggccctggcccacatgatcaagttccggggccacttcctgatcgagggcgacctgaaccccgacaactccgacgtggacaagctgttcatccagctggtgcagacctacaaccagctgttcgaggagaaccccatcaacgcctccggcgtggacgccaaggccatcctgtccgcccggctgtccaagtcccggcggctggagaacctgatcgcccagctgcccggcgagaagaagaacggcctgttcggcaacctgatcgccctgtccctgggcctgacccccaacttcaagtccaacttcgacctggccgaggacgccaagctgcagctgtccaaggacacctacgacgacgacctggacaacctgctggcccagatcggcgaccagtacgccgacctgttcctggccgccaagaacctgtccgacgccatcctgctgtccgacatcctgcgggtgaacaccgagatcaccaaggcccccctgtccgcctccatgatcaagcggtacgacgagcaccaccaggacctgaccctgctgaaggccctggtgcggcagcagctgcccgagaagtacaaggagatcttcttcgaccagtccaagaacggctacgccggctacatcgacggcggcgcctcccaggaggagttctacaagttcatcaagcccatcctggagaagatggacggcaccgaggagctgctggtgaagctgaaccgggaggacctgctgcggaagcagcggaccttcgacaacggctccatcccccaccagatccacctgggcgagctgcacgccatcctgcggcggcaggaggacttctaccccttcctgaaggacaaccgggagaagatcgagaagatcctgaccttccggatcccctactacgtgggccccctggcccggggcaactcccggttcgcctggatgacccggaagtccgaggagaccatcaccccctggaacttcgaggaggtggtggacaagggcgcctccgcccagtccttcatcgagcggatgaccaacttcgacaagaacctgcccaacgagaaggtgctgcccaagcactccctgctgtacgagtacttcaccgtgtacaacgagctgaccaaggtgaagtacgtgaccgagggcatgcggaagcccgccttcctgtccggcgagcagaagaaggccatcgtggacctgctgttcaagaccaaccggaaggtgaccgtgaagcagctgaaggaggactacttcaagaagatcgagtgcttcgactccgtggagatctccggcgtggaggaccggttcaacgcctccctgggcacctaccacgacctgctgaagatcatcaaggacaaggacttcctggacaacgaggagaacgaggacatcctggaggacatcgtgctgaccctgaccctgttcgaggaccgggagatgatcgaggagcggctgaagacctacgcccacctgttcgacgacaaggtgatgaagcagctgaagcggcggcggtacaccggctggggccggctgtcccggaagctgatcaacggcatccgggacaagcagtccggcaagaccatcctggacttcctgaagtccgacggcttcgccaaccggaacttcatgcagctgatccacgacgactccctgaccttcaaggaggacatccagaaggcccaggtgtccggccagggcgactccctgcacgagcacatcgccaacctggccggctcccccgccatcaagaagggcatcctgcagaccgtgaaggtggtggacgagctggtgaaggtgatgggccggcacaagcccgagaacatcgtgatcgagatggcccgggagaaccagaccacccagaagggccagaagaactcccgggagcggatgaagcggatcgaggagggcatcaaggagctgggctcccagatcctgaaggagcaccccgtggagaacacccagctgcagaacgagaagctgtacctgtactacctgcagaacggccgggacatgtacgtggaccaggagctggacatcaaccggctgtccgactacgacgtggaccacatcgtgccccagtccttcctgaaggacgactccatcgacaacaaggtgctgacccggtccgacaagaaccggggcaagtccgacaacgtgccctccgaggaggtggtgaagaagatgaagaactactggcggcagctgctgaacgccaagctgatcacccagcggaagttcgacaacctgaccaaggccgagcggggcggcctgtccgagctggacaaggccggcttcatcaagcggcagctggtggagacccggcagatcaccaagcacgtggcccagatcctggactcccggatgaacaccaagtacgacgagaacgacaagctgatccgggaggtgaaggtgatcaccctgaagtccaagctggtgtccgacttccggaaggacttccagttctacaaggtgcgggagatcaacaactaccaccacgcccacgacgcctacctgaacgccgtggtgggcaccgccctgatcaagaagtaccccaagctggagtccgagttcgtgtacggcgactacaaggtgtacgacgtgcggaagatgatcgccaagtccgagcaggagatcggcaaggccaccgccaagtacttcttctactccaacatcatgaacttcttcaagaccgagatcaccctggccaacggcgagatccggaagcggcccctgatcgagaccaacggcgagaccggcgagatcgtgtgggacaagggccgggacttcgccaccgtgcggaaggtgctgtccatgccccaggtgaacatcgtgaagaagaccgaggtgcagaccggcggcttctccaaggagtccatcctgcccaagcggaactccgacaagctgatcgcccggaagaaggactgggaccccaagaagtacggcggcttcgactcccccaccgtggcctactccgtgctggtggtggccaaggtggagaagggcaagtccaagaagctgaagtccgtgaaggagctgctgggcatcaccatcatggagcggtcctccttcgagaagaaccccatcgacttcctggaggccaagggctacaaggaggtgaagaaggacctgatcatcaagctgcccaagtactccctgttcgagctggagaacggccggaagcggatgctggcctccgccggcgagctgcagaagggcaacgagctggccctgccctccaagtacgtgaacttcctgtacctggcctcccactacgagaagctgaagggctcccccgaggacaacgagcagaagcagctgttcgtggagcagcacaagcactacctggacgagatcatcgagcagatctccgagttctccaagcgggtgatcctggccgacgccaacctggacaaggtgctgtccgcctacaacaagcaccgggacaagcccatccgggagcaggccgagaacatcatccacctgttcaccctgaccaacctgggcgcccccgccgccttcaagtacttcgacaccaccatcgaccggaagcggtacacctccaccaaggaggtgctggacgccaccctgatccaccagtccatcaccggcctgtacgagacccggatcgacctgtcccagctgggcggcgacggcggcggctcccccaagaagaagcggaaggtgtccgagtccgccacccccgagtccgtgtccggctggcggctgttcaagaagatctcctgactagcaccagcctcaagaacacccgaatggagtctctaagctacataataccaacttacactttacaaaatgttgtcccccaaaatgtagccattcgtatctgctcctaataaaaagaaagtttcttcacattctctcgagaaaaaaaaaaaaaaaaaaaaaaaaaaaaaaaaaaaaaaaaaaaaaaaaaaaaaaaaaaaaaaaaaaaaaaaaaaaaaaaaaaaaaaaaaaaaatctag

SEQ ID NO: 36 - RNA, 4197 nt, synthetic construct
  misc_feature 1..4197: note = Synthetic: SpyCas9 with HiBit tag (mRNA K) -ORF sequence
  source 1..4197: mol_type = other RNA
atggacaagaagtactccatcggcctggacatcggcaccaactccgtgggctgggccgtgatcaccgacgagtacaaggtgccctccaagaagttcaaggtgctgggcaacaccgaccggcactccatcaagaagaacctgatcggcgccctgctgttcgactccggcgagaccgccgaggccacccggctgaagcggaccgcccggcggcggtacacccggcggaagaaccggatctgctacctgcaggagatcttctccaacgagatggccaaggtggacgactccttcttccaccggctggaggagtccttcctggtggaggaggacaagaagcacgagcggcaccccatcttcggcaacatcgtggacgaggtggcctaccacgagaagtaccccaccatctaccacctgcggaagaagctggtggactccaccgacaaggccgacctgcggctgatctacctggccctggcccacatgatcaagttccggggccacttcctgatcgagggcgacctgaaccccgacaactccgacgtggacaagctgttcatccagctggtgcagacctacaaccagctgttcgaggagaaccccatcaacgcctccggcgtggacgccaaggccatcctgtccgcccggctgtccaagtcccggcggctggagaacctgatcgcccagctgcccggcgagaagaagaacggcctgttcggcaacctgatcgccctgtccctgggcctgacccccaacttcaagtccaacttcgacctggccgaggacgccaagctgcagctgtccaaggacacctacgacgacgacctggacaacctgctggcccagatcggcgaccagtacgccgacctgttcctggccgccaagaacctgtccgacgccatcctgctgtccgacatcctgcgggtgaacaccgagatcaccaaggcccccctgtccgcctccatgatcaagcggtacgacgagcaccaccaggacctgaccctgctgaaggccctggtgcggcagcagctgcccgagaagtacaaggagatcttcttcgaccagtccaagaacggctacgccggctacatcgacggcggcgcctcccaggaggagttctacaagttcatcaagcccatcctggagaagatggacggcaccgaggagctgctggtgaagctgaaccgggaggacctgctgcggaagcagcggaccttcgacaacggctccatcccccaccagatccacctgggcgagctgcacgccatcctgcggcggcaggaggacttctaccccttcctgaaggacaaccgggagaagatcgagaagatcctgaccttccggatcccctactacgtgggccccctggcccggggcaactcccggttcgcctggatgacccggaagtccgaggagaccatcaccccctggaacttcgaggaggtggtggacaagggcgcctccgcccagtccttcatcgagcggatgaccaacttcgacaagaacctgcccaacgagaaggtgctgcccaagcactccctgctgtacgagtacttcaccgtgtacaacgagctgaccaaggtgaagtacgtgaccgagggcatgcggaagcccgccttcctgtccggcgagcagaagaaggccatcgtggacctgctgttcaagaccaaccggaaggtgaccgtgaagcagctgaaggaggactacttcaagaagatcgagtgcttcgactccgtggagatctccggcgtggaggaccggttcaacgcctccctgggcacctaccacgacctgctgaagatcatcaaggacaaggacttcctggacaacgaggagaacgaggacatcctggaggacatcgtgctgaccctgaccctgttcgaggaccgggagatgatcgaggagcggctgaagacctacgcccacctgttcgacgacaaggtgatgaagcagctgaagcggcggcggtacaccggctggggccggctgtcccggaagctgatcaacggcatccgggacaagcagtccggcaagaccatcctggacttcctgaagtccgacggcttcgccaaccggaacttcatgcagctgatccacgacgactccctgaccttcaaggaggacatccagaaggcccaggtgtccggccagggcgactccctgcacgagcacatcgccaacctggccggctcccccgccatcaagaagggcatcctgcagaccgtgaaggtggtggacgagctggtgaaggtgatgggccggcacaagcccgagaacatcgtgatcgagatggcccgggagaaccagaccacccagaagggccagaagaactcccgggagcggatgaagcggatcgaggagggcatcaaggagctgggctcccagatcctgaaggagcaccccgtggagaacacccagctgcagaacgagaagctgtacctgtactacctgcagaacggccgggacatgtacgtggaccaggagctggacatcaaccggctgtccgactacgacgtggaccacatcgtgccccagtccttcctgaaggacgactccatcgacaacaaggtgctgacccggtccgacaagaaccggggcaagtccgacaacgtgccctccgaggaggtggtgaagaagatgaagaactactggcggcagctgctgaacgccaagctgatcacccagcggaagttcgacaacctgaccaaggccgagcggggcggcctgtccgagctggacaaggccggcttcatcaagcggcagctggtggagacccggcagatcaccaagcacgtggcccagatcctggactcccggatgaacaccaagtacgacgagaacgacaagctgatccgggaggtgaaggtgatcaccctgaagtccaagctggtgtccgacttccggaaggacttccagttctacaaggtgcgggagatcaacaactaccaccacgcccacgacgcctacctgaacgccgtggtgggcaccgccctgatcaagaagtaccccaagctggagtccgagttcgtgtacggcgactacaaggtgtacgacgtgcggaagatgatcgccaagtccgagcaggagatcggcaaggccaccgccaagtacttcttctactccaacatcatgaacttcttcaagaccgagatcaccctggccaacggcgagatccggaagcggcccctgatcgagaccaacggcgagaccggcgagatcgtgtgggacaagggccgggacttcgccaccgtgcggaaggtgctgtccatgccccaggtgaacatcgtgaagaagaccgaggtgcagaccggcggcttctccaaggagtccatcctgcccaagcggaactccgacaagctgatcgcccggaagaaggactgggaccccaagaagtacggcggcttcgactcccccaccgtggcctactccgtgctggtggtggccaaggtggagaagggcaagtccaagaagctgaagtccgtgaaggagctgctgggcatcaccatcatggagcggtcctccttcgagaagaaccccatcgacttcctggaggccaagggctacaaggaggtgaagaaggacctgatcatcaagctgcccaagtactccctgttcgagctggagaacggccggaagcggatgctggcctccgccggcgagctgcagaagggcaacgagctggccctgccctccaagtacgtgaacttcctgtacctggcctcccactacgagaagctgaagggctcccccgaggacaacgagcagaagcagctgttcgtggagcagcacaagcactacctggacgagatcatcgagcagatctccgagttctccaagcgggtgatcctggccgacgccaacctggacaaggtgctgtccgcctacaacaagcaccgggacaagcccatccgggagcaggccgagaacatcatccacctgttcaccctgaccaacctgggcgcccccgccgccttcaagtacttcgacaccaccatcgaccggaagcggtacacctccaccaaggaggtgctggacgccaccctgatccaccagtccatcaccggcctgtacgagacccggatcgacctgtcccagctgggcggcgacggcggcggctcccccaagaagaagcggaaggtgtccgagtccgccacccccgagtccgtgtccggctggcggctgttcaagaagatctcctga

SEQ ID NO: 37 - protein, 1398 aa, synthetic construct
  REGION 1..1398: note = Synthetic: SpyCas9 with HiBit tag (mRNA K) -amino acid sequence
MDKKYSIGLDIGTNSVGWAVITDEYKVPSKKFKVLGNTDRHSIKKNLIGALLFDSGETAEATRLKRTARRRYTRRKNRICYLQEIFSNEMAKVDDSFFHRLEESFLVEEDKKHERHPIFGNIVDEVAYHEKYPTIYHLRKKLVDSTDKADLRLIYLALAHMIKFRGHFLIEGDLNPDNSDVDKLFIQLVQTYNQLFEENPINASGVDAKAILSARLSKSRRLENLIAQLPGEKKNGLFGNLIALSLGLTPNFKSNFDLAEDAKLQLSKDTYDDDLDNLLAQIGDQYADLFLAAKNLSDAILLSDILRVNTEITKAPLSASMIKRYDEHHQDLTLLKALVRQQLPEKYKEIFFDQSKNGYAGYIDGGASQEEFYKFIKPILEKMDGTEELLVKLNREDLLRKQRTFDNGSIPHQIHLGELHAILRRQEDFYPFLKDNREKIEKILTFRIPYYVGPLARGNSRFAWMTRKSEETITPWNFEEVVDKGASAQSFIERMTNFDKNLPNEKVLPKHSLLYEYFTVYNELTKVKYVTEGMRKPAFLSGEQKKAIVDLLFKTNRKVTVKQLKEDYFKKIECFDSVEISGVEDRFNASLGTYHDLLKIIKDKDFLDNEENEDILEDIVLTLTLFEDREMIEERLKTYAHLFDDKVMKQLKRRRYTGWGRLSRKLINGIRDKQSGKTILDFLKSDGFANRNFMQLIHDDSLTFKEDIQKAQVSGQGDSLHEHIANLAGSPAIKKGILQTVKVVDELVKVMGRHKPENIVIEMARENQTTQKGQKNSRERMKRIEEGIKELGSQILKEHPVENTQLQNEKLYLYYLQNGRDMYVDQELDINRLSDYDVDHIVPQSFLKDDSIDNKVLTRSDKNRGKSDNVPSEEVVKKMKNYWRQLLNAKLITQRKFDNLTKAERGGLSELDKAGFIKRQLVETRQITKHVAQILDSRMNTKYDENDKLIREVKVITLKSKLVSDFRKDFQFYKVREINNYHHAHDAYLNAVVGTALIKKYPKLESEFVYGDYKVYDVRKMIAKSEQEIGKATAKYFFYSNIMNFFKTEITLANGEIRKRPLIETNGETGEIVWDKGRDFATVRKVLSMPQVNIVKKTEVQTGGFSKESILPKRNSDKLIARKKDWDPKKYGGFDSPTVAYSVLVVAKVEKGKSKKLKSVKELLGITIMERSSFEKNPIDFLEAKGYKEVKKDLIIKLPKYSLFELENGRKRMLASAGELQKGNELALPSKYVNFLYLASHYEKLKGSPEDNEQKQLFVEQHKHYLDEIIEQISEFSKRVILADANLDKVLSAYNKHRDKPIREQAENIIHLFTLTNLGAPAAFKYFDTTIDRKRYTSTKEVLDATLIHQSITGLYETRIDLSQLGGDGGGSPKKKRKVSESATPESVSGWRLFKKIS

SEQ ID NO: 38 - RNA, 8217 nt, synthetic construct
  misc_feature 1..8217: note = Synthetic: Cas9-Cas9 fusion(mRNA L)-mRNA sequence
  source 1..8217: mol_type = other RNA
gggaagctcagaataaacgctcaactttggccggatctgccaccatggacaagaagtactccatcggcctggacatcggcaccaactccgtgggctgggccgtgatcaccgacgagtacaaggtgccctccaagaagttcaaggtgctgggcaacaccgaccggcactccatcaagaagaacctgatcggcgccctgctgttcgactccggcgagaccgccgaggccacccggctgaagcggaccgcccggcggcggtacacccggcggaagaaccggatctgctacctgcaggagatcttctccaacgagatggccaaggtggacgactccttcttccaccggctggaggagtccttcctggtggaggaggacaagaagcacgagcggcaccccatcttcggcaacatcgtggacgaggtggcctaccacgagaagtaccccaccatctaccacctgcggaagaagctggtggactccaccgacaaggccgacctgcggctgatctacctggccctggcccacatgatcaagttccggggccacttcctgatcgagggcgacctgaaccccgacaactccgacgtggacaagctgttcatccagctggtgcagacctacaaccagctgttcgaggagaaccccatcaacgcctccggcgtggacgccaaggccatcctgtccgcccggctgtccaagtcccggcggctggagaacctgatcgcccagctgcccggcgagaagaagaacggcctgttcggcaacctgatcgccctgtccctgggcctgacccccaacttcaagtccaacttcgacctggccgaggacgccaagctgcagctgtccaaggacacctacgacgacgacctggacaacctgctggcccagatcggcgaccagtacgccgacctgttcctggccgccaagaacctgtccgacgccatcctgctgtccgacatcctgcgggtgaacaccgagatcaccaaggcccccctgtccgcctccatgatcaagcggtacgacgagcaccaccaggacctgaccctgctgaaggccctggtgcggcagcagctgcccgagaagtacaaggagatcttcttcgaccagtccaagaacggctacgccggctacatcgacggcggcgcctcccaggaggagttctacaagttcatcaagcccatcctggagaagatggacggcaccgaggagctgctggtgaagctgaaccgggaggacctgctgcggaagcagcggaccttcgacaacggctccatcccccaccagatccacctgggcgagctgcacgccatcctgcggcggcaggaggacttctaccccttcctgaaggacaaccgggagaagatcgagaagatcctgaccttccggatcccctactacgtgggccccctggcccggggcaactcccggttcgcctggatgacccggaagtccgaggagaccatcaccccctggaacttcgaggaggtggtggacaagggcgcctccgcccagtccttcatcgagcggatgaccaacttcgacaagaacctgcccaacgagaaggtgctgcccaagcactccctgctgtacgagtacttcaccgtgtacaacgagctgaccaaggtgaagtacgtgaccgagggcatgcggaagcccgccttcctgtccggcgagcagaagaaggccatcgtggacctgctgttcaagaccaaccggaaggtgaccgtgaagcagctgaaggaggactacttcaagaagatcgagtgcttcgactccgtggagatctccggcgtggaggaccggttcaacgcctccctgggcacctaccacgacctgctgaagatcatcaaggacaaggacttcctggacaacgaggagaacgaggacatcctggaggacatcgtgctgaccctgaccctgttcgaggaccgggagatgatcgaggagcggctgaagacctacgcccacctgttcgacgacaaggtgatgaagcagctgaagcggcggcggtacaccggctggggccggctgtcccggaagctgatcaacggcatccgggacaagcagtccggcaagaccatcctggacttcctgaagtccgacggcttcgccaaccggaacttcatgcagctgatccacgacgactccctgaccttcaaggaggacatccagaaggcccaggtgtccggccagggcgactccctgcacgagcacatcgccaacctggccggctcccccgccatcaagaagggcatcctgcagaccgtgaaggtggtggacgagctggtgaaggtgatgggccggcacaagcccgagaacatcgtgatcgagatggcccgggagaaccagaccacccagaagggccagaagaactcccgggagcggatgaagcggatcgaggagggcatcaaggagctgggctcccagatcctgaaggagcaccccgtggagaacacccagctgcagaacgagaagctgtacctgtactacctgcagaacggccgggacatgtacgtggaccaggagctggacatcaaccggctgtccgactacgacgtggaccacatcgtgccccagtccttcctgaaggacgactccatcgacaacaaggtgctgacccggtccgacaagaaccggggcaagtccgacaacgtgccctccgaggaggtggtgaagaagatgaagaactactggcggcagctgctgaacgccaagctgatcacccagcggaagttcgacaacctgaccaaggccgagcggggcggcctgtccgagctggacaaggccggcttcatcaagcggcagctggtggagacccggcagatcaccaagcacgtggcccagatcctggactcccggatgaacaccaagtacgacgagaacgacaagctgatccgggaggtgaaggtgatcaccctgaagtccaagctggtgtccgacttccggaaggacttccagttctacaaggtgcgggagatcaacaactaccaccacgcccacgacgcctacctgaacgccgtggtgggcaccgccctgatcaagaagtaccccaagctggagtccgagttcgtgtacggcgactacaaggtgtacgacgtgcggaagatgatcgccaagtccgagcaggagatcggcaaggccaccgccaagtacttcttctactccaacatcatgaacttcttcaagaccgagatcaccctggccaacggcgagatccggaagcggcccctgatcgagaccaacggcgagaccggcgagatcgtgtgggacaagggccgggacttcgccaccgtgcggaaggtgctgtccatgccccaggtgaacatcgtgaagaagaccgaggtgcagaccggcggcttctccaaggagtccatcctgcccaagcggaactccgacaagctgatcgcccggaagaaggactgggaccccaagaagtacggcggcttcgactcccccaccgtggcctactccgtgctggtggtggccaaggtggagaagggcaagtccaagaagctgaagtccgtgaaggagctgctgggcatcaccatcatggagcggtcctccttcgagaagaaccccatcgacttcctggaggccaagggctacaaggaggtgaagaaggacctgatcatcaagctgcccaagtactccctgttcgagctggagaacggccggaagcggatgctggcctccgccggcgagctgcagaagggcaacgagctggccctgccctccaagtacgtgaacttcctgtacctggcctcccactacgagaagctgaagggctcccccgaggacaacgagcagaagcagctgttcgtggagcagcacaagcactacctggacgagatcatcgagcagatctccgagttctccaagcgggtgatcctggccgacgccaacctggacaaggtgctgtccgcctacaacaagcaccgggacaagcccatccgggagcaggccgagaacatcatccacctgttcaccctgaccaacctgggcgcccccgccgccttcaagtacttcgacaccaccatcgacaagaagcggtacacctccaccaaggaggtgctggacgccaccctgatccaccagtccatcaccggcctgtacgagacccggatcgacctgtcccagctgggcggcgacggcgcccccgagtccgccaccgagtccggcggcacctccaccgagtccgagggctccgccggcacctccaccgagtccgagggctccgccggctccgccggctccacctccggcggctccggcggcggctccggcggctccggctccgccggcacctccaccgagtccgagggctccgccggcacctccgagtccgccaccgagtccggcggcacctccaccgagtccgagggctcctcctccggcgccgccttcaagcccaaccccatcaactacatcctgggcctggacatcggcatcgcctccgtgggctgggccatggtggagatcgacgaggaggagaaccccatccggctgatcgacctgggcgtgcgggtgttcgagcgggccgaggtgcccaagaccggcgactccctggccatggcccggcggctggcccggtccgtgcggcggctgacccggcggcgggcccaccggctgctgcgggcccggcggctgctgaagcgggagggcgtgctgcaggccgccgacttcgacgagaacggcctgatcaagtccctgcccaacaccccctggcagctgcgggccgccgccctggaccggaagctgacccccctggagtggtccgccgtgctgctgcacctgatcaagcaccggggctacctgtcccagcggaagaacgagggcgagaccgccgacaaggagctgggcgccctgctgaagggcgtggccaacaacgcccacgccctgcagaccggcgacttccggacccccgccgagctggccctgaacaagttcgagaaggagtccggccacatccggaaccagcggggcgactactcccacaccttctcccggaaggacctgcaggccgagctgatcctgctgttcgagaagcagaaggagttcggcaacccccacgtgtccggcggcctgaaggagggcatcgagaccctgctgatgacccagcggcccgccctgtccggcgacgccgtgcagaagatgctgggccactgcaccttcgagcccgccgagcccaaggccgccaagaacacctacaccgccgagcggttcatctggctgaccaagctgaacaacctgcggatcctggagcagggctccgagcggcccctgaccgacaccgagcgggccaccctgatggacgagccctaccggaagtccaagctgacctacgcccaggcccggaagctgctgggcctggaggacaccgccttcttcaagggcctgcggtacggcaaggacaacgccgaggcctccaccctgatggagatgaaggcctaccacgccatctcccgggccctggagaaggagggcctgaaggacaagaagtcccccctgaacctgtcctccgagctgcaggacgagatcggcaccgccttctccctgttcaagaccgacgaggacatcaccggccggctgaaggaccgggtgcagcccgagatcctggaggccctgctgaagcacatctccttcgacaagttcgtgcagatctccctgaaggccctgcggcggatcgtgcccctgatggagcagggcaagcggtacgacgaggcctgcgccgagatctacggcgaccactacggcaagaagaacaccgaggagaagatctacctgccccccatccccgccgacgagatccggaaccccgtggtgctgcgggccctgtcccaggcccggaaggtgatcaacggcgtggtgcggcggtacggctcccccgcccggatccacatcgagaccgcccgggaggtgggcaagtccttcaaggaccggaaggagatcgagaagcggcaggaggagaaccggaaggaccgggagaaggccgccgccaagttccgggagtacttccccaacttcgtgggcgagcccaagtccaaggacatcctgaagctgcggctgtacgagcagcagcacggcaagtgcctgtactccggcaaggagatcaacctggtgcggctgaacgagaagggctacgtggagatcgaccacgccctgcccttctcccggacctgggacgactccttcaacaacaaggtgctggtgctgggctccgagaaccagaacaagggcaaccagaccccctacgagtacttcaacggcaaggacaactcccgggagtggcaggagttcaaggcccgggtggagacctcccggttcccccggtccaagaagcagcggatcctgctgcagaagttcgacgaggacggcttcaaggagtgcaacctgaacgacacccggtacgtgaaccggttcctgtgccagttcgtggccgaccacatcctgctgaccggcaagggcaagcggcgggtgttcgcctccaacggccagatcaccaacctgctgcggggcttctggggcctgcggaaggtgcgggccgagaacgaccggcaccacgccctggacgccgtggtggtggcctgctccaccgtggccatgcagcagaagatcacccggttcgtgcggtacaaggagatgaacgccttcgacggcaagaccatcgacaaggagaccggcaaggtgctgcaccagaagacccacttcccccagccctgggagttcttcgcccaggaggtgatgatccgggtgttcggcaagcccgacggcaagcccgagttcgaggaggccgacacccccgagaagctgcggaccctgctggccgagaagctgtcctcccggcccgaggccgtgcacgagtacgtgacccccctgttcgtgtcccgggcccccaaccggaagatgtccggcgcccacaaggacaccctgcggtccgccaagcggttcgtgaagcacaacgagaagatctccgtgaagcgggtgtggctgaccgagatcaagctggccgacctggagaacatggtgaactacaagaacggccgggagatcgagctgtacgaggccctgaaggcccggctggaggcctacggcggcaacgccaagcaggccttcgaccccaaggacaaccccttctacaagaagggcggccagctggtgaaggccgtgcgggtggagaagacccaggagtccggcgtgctgctgaacaagaagaacgcctacaccatcgccgacaacggcgacatggtgcgggtggacgtgttctgcaaggtggacaagaagggcaagaaccagtacttcatcgtgcccatctacgcctggcaggtggccgagaacatcctgcccgacatcgactgcaagggctaccggatcgacgactcctacaccttctgcttctccctgcacaagtacgacctgatcgccttccagaaggacgagaagtccaaggtggagttcgcctactacatcaactgcgactcctccaacggccggttctacctggcctggcacgacaagggctccaaggagcagcagttccggatctccacccagaacctggtgctgatccagaagtaccaggtgaacgagctgggcaaggagatccggccctgccggctgaagaagcggccccccgtgcggtccggcaagcggaccgccgacggctccggcggcggctcccccaagaagaagcggaaggtggagtagctagcaccagcctcaagaacacccgaatggagtctctaagctacataataccaacttacactttacaaaatgttgtcccccaaaatgtagccattcgtatctgctcctaataaaaagaaagtttcttcacattctctcgagaaaaaaaaaaaatggaaaaaaaaaaaacggaaaaaaaaaaaaggtaaaaaaaaaaaatataaaaaaaaaaaacataaaaaaaaaaaacgaaaaaaaaaaaacgtaaaaaaaaaaaactcaaaaaaaaaaagataaaaaaaaaaaacctaaaaaaaaaaaatgtaaaaaaaaaaaagggaaaaaaaaaaaacgcaaaaaaaaaaaacacaaaaaaaaaaaatgcaaaaaaaaaaaatcgaaaaaaaaaaaatctaaaaaaaaaaaacgaaaaaaaaaaaacccaaaaaaaaaaaagacaaaaaaaaaaaatagaaaaaaaaaaagttaaaaaaaaaaaactgaaaaaaaaaaaatttaaaaaaaaaaaatctag

SEQ ID NO: 39 - RNA, 7659 nt, synthetic construct
  misc_feature 1..7659: note = Synthetic: Cas9-Cas9 fusion(mRNA L)-ORF sequence
  source 1..7659: mol_type = other RNA
atggacaagaagtactccatcggcctggacatcggcaccaactccgtgggctgggccgtgatcaccgacgagtacaaggtgccctccaagaagttcaaggtgctgggcaacaccgaccggcactccatcaagaagaacctgatcggcgccctgctgttcgactccggcgagaccgccgaggccacccggctgaagcggaccgcccggcggcggtacacccggcggaagaaccggatctgctacctgcaggagatcttctccaacgagatggccaaggtggacgactccttcttccaccggctggaggagtccttcctggtggaggaggacaagaagcacgagcggcaccccatcttcggcaacatcgtggacgaggtggcctaccacgagaagtaccccaccatctaccacctgcggaagaagctggtggactccaccgacaaggccgacctgcggctgatctacctggccctggcccacatgatcaagttccggggccacttcctgatcgagggcgacctgaaccccgacaactccgacgtggacaagctgttcatccagctggtgcagacctacaaccagctgttcgaggagaaccccatcaacgcctccggcgtggacgccaaggccatcctgtccgcccggctgtccaagtcccggcggctggagaacctgatcgcccagctgcccggcgagaagaagaacggcctgttcggcaacctgatcgccctgtccctgggcctgacccccaacttcaagtccaacttcgacctggccgaggacgccaagctgcagctgtccaaggacacctacgacgacgacctggacaacctgctggcccagatcggcgaccagtacgccgacctgttcctggccgccaagaacctgtccgacgccatcctgctgtccgacatcctgcgggtgaacaccgagatcaccaaggcccccctgtccgcctccatgatcaagcggtacgacgagcaccaccaggacctgaccctgctgaaggccctggtgcggcagcagctgcccgagaagtacaaggagatcttcttcgaccagtccaagaacggctacgccggctacatcgacggcggcgcctcccaggaggagttctacaagttcatcaagcccatcctggagaagatggacggcaccgaggagctgctggtgaagctgaaccgggaggacctgctgcggaagcagcggaccttcgacaacggctccatcccccaccagatccacctgggcgagctgcacgccatcctgcggcggcaggaggacttctaccccttcctgaaggacaaccgggagaagatcgagaagatcctgaccttccggatcccctactacgtgggccccctggcccggggcaactcccggttcgcctggatgacccggaagtccgaggagaccatcaccccctggaacttcgaggaggtggtggacaagggcgcctccgcccagtccttcatcgagcggatgaccaacttcgacaagaacctgcccaacgagaaggtgctgcccaagcactccctgctgtacgagtacttcaccgtgtacaacgagctgaccaaggtgaagtacgtgaccgagggcatgcggaagcccgccttcctgtccggcgagcagaagaaggccatcgtggacctgctgttcaagaccaaccggaaggtgaccgtgaagcagctgaaggaggactacttcaagaagatcgagtgcttcgactccgtggagatctccggcgtggaggaccggttcaacgcctccctgggcacctaccacgacctgctgaagatcatcaaggacaaggacttcctggacaacgaggagaacgaggacatcctggaggacatcgtgctgaccctgaccctgttcgaggaccgggagatgatcgaggagcggctgaagacctacgcccacctgttcgacgacaaggtgatgaagcagctgaagcggcggcggtacaccggctggggccggctgtcccggaagctgatcaacggcatccgggacaagcagtccggcaagaccatcctggacttcctgaagtccgacggcttcgccaaccggaacttcatgcagctgatccacgacgactccctgaccttcaaggaggacatccagaaggcccaggtgtccggccagggcgactccctgcacgagcacatcgccaacctggccggctcccccgccatcaagaagggcatcctgcagaccgtgaaggtggtggacgagctggtgaaggtgatgggccggcacaagcccgagaacatcgtgatcgagatggcccgggagaaccagaccacccagaagggccagaagaactcccgggagcggatgaagcggatcgaggagggcatcaaggagctgggctcccagatcctgaaggagcaccccgtggagaacacccagctgcagaacgagaagctgtacctgtactacctgcagaacggccgggacatgtacgtggaccaggagctggacatcaaccggctgtccgactacgacgtggaccacatcgtgccccagtccttcctgaaggacgactccatcgacaacaaggtgctgacccggtccgacaagaaccggggcaagtccgacaacgtgccctccgaggaggtggtgaagaagatgaagaactactggcggcagctgctgaacgccaagctgatcacccagcggaagttcgacaacctgaccaaggccgagcggggcggcctgtccgagctggacaaggccggcttcatcaagcggcagctggtggagacccggcagatcaccaagcacgtggcccagatcctggactcccggatgaacaccaagtacgacgagaacgacaagctgatccgggaggtgaaggtgatcaccctgaagtccaagctggtgtccgacttccggaaggacttccagttctacaaggtgcgggagatcaacaactaccaccacgcccacgacgcctacctgaacgccgtggtgggcaccgccctgatcaagaagtaccccaagctggagtccgagttcgtgtacggcgactacaaggtgtacgacgtgcggaagatgatcgccaagtccgagcaggagatcggcaaggccaccgccaagtacttcttctactccaacatcatgaacttcttcaagaccgagatcaccctggccaacggcgagatccggaagcggcccctgatcgagaccaacggcgagaccggcgagatcgtgtgggacaagggccgggacttcgccaccgtgcggaaggtgctgtccatgccccaggtgaacatcgtgaagaagaccgaggtgcagaccggcggcttctccaaggagtccatcctgcccaagcggaactccgacaagctgatcgcccggaagaaggactgggaccccaagaagtacggcggcttcgactcccccaccgtggcctactccgtgctggtggtggccaaggtggagaagggcaagtccaagaagctgaagtccgtgaaggagctgctgggcatcaccatcatggagcggtcctccttcgagaagaaccccatcgacttcctggaggccaagggctacaaggaggtgaagaaggacctgatcatcaagctgcccaagtactccctgttcgagctggagaacggccggaagcggatgctggcctccgccggcgagctgcagaagggcaacgagctggccctgccctccaagtacgtgaacttcctgtacctggcctcccactacgagaagctgaagggctcccccgaggacaacgagcagaagcagctgttcgtggagcagcacaagcactacctggacgagatcatcgagcagatctccgagttctccaagcgggtgatcctggccgacgccaacctggacaaggtgctgtccgcctacaacaagcaccgggacaagcccatccgggagcaggccgagaacatcatccacctgttcaccctgaccaacctgggcgcccccgccgccttcaagtacttcgacaccaccatcgacaagaagcggtacacctccaccaaggaggtgctggacgccaccctgatccaccagtccatcaccggcctgtacgagacccggatcgacctgtcccagctgggcggcgacggcgcccccgagtccgccaccgagtccggcggcacctccaccgagtccgagggctccgccggcacctccaccgagtccgagggctccgccggctccgccggctccacctccggcggctccggcggcggctccggcggctccggctccgccggcacctccaccgagtccgagggctccgccggcacctccgagtccgccaccgagtccggcggcacctccaccgagtccgagggctcctcctccggcgccgccttcaagcccaaccccatcaactacatcctgggcctggacatcggcatcgcctccgtgggctgggccatggtggagatcgacgaggaggagaaccccatccggctgatcgacctgggcgtgcgggtgttcgagcgggccgaggtgcccaagaccggcgactccctggccatggcccggcggctggcccggtccgtgcggcggctgacccggcggcgggcccaccggctgctgcgggcccggcggctgctgaagcgggagggcgtgctgcaggccgccgacttcgacgagaacggcctgatcaagtccctgcccaacaccccctggcagctgcgggccgccgccctggaccggaagctgacccccctggagtggtccgccgtgctgctgcacctgatcaagcaccggggctacctgtcccagcggaagaacgagggcgagaccgccgacaaggagctgggcgccctgctgaagggcgtggccaacaacgcccacgccctgcagaccggcgacttccggacccccgccgagctggccctgaacaagttcgagaaggagtccggccacatccggaaccagcggggcgactactcccacaccttctcccggaaggacctgcaggccgagctgatcctgctgttcgagaagcagaaggagttcggcaacccccacgtgtccggcggcctgaaggagggcatcgagaccctgctgatgacccagcggcccgccctgtccggcgacgccgtgcagaagatgctgggccactgcaccttcgagcccgccgagcccaaggccgccaagaacacctacaccgccgagcggttcatctggctgaccaagctgaacaacctgcggatcctggagcagggctccgagcggcccctgaccgacaccgagcgggccaccctgatggacgagccctaccggaagtccaagctgacctacgcccaggcccggaagctgctgggcctggaggacaccgccttcttcaagggcctgcggtacggcaaggacaacgccgaggcctccaccctgatggagatgaaggcctaccacgccatctcccgggccctggagaaggagggcctgaaggacaagaagtcccccctgaacctgtcctccgagctgcaggacgagatcggcaccgccttctccctgttcaagaccgacgaggacatcaccggccggctgaaggaccgggtgcagcccgagatcctggaggccctgctgaagcacatctccttcgacaagttcgtgcagatctccctgaaggccctgcggcggatcgtgcccctgatggagcagggcaagcggtacgacgaggcctgcgccgagatctacggcgaccactacggcaagaagaacaccgaggagaagatctacctgccccccatccccgccgacgagatccggaaccccgtggtgctgcgggccctgtcccaggcccggaaggtgatcaacggcgtggtgcggcggtacggctcccccgcccggatccacatcgagaccgcccgggaggtgggcaagtccttcaaggaccggaaggagatcgagaagcggcaggaggagaaccggaaggaccgggagaaggccgccgccaagttccgggagtacttccccaacttcgtgggcgagcccaagtccaaggacatcctgaagctgcggctgtacgagcagcagcacggcaagtgcctgtactccggcaaggagatcaacctggtgcggctgaacgagaagggctacgtggagatcgaccacgccctgcccttctcccggacctgggacgactccttcaacaacaaggtgctggtgctgggctccgagaaccagaacaagggcaaccagaccccctacgagtacttcaacggcaaggacaactcccgggagtggcaggagttcaaggcccgggtggagacctcccggttcccccggtccaagaagcagcggatcctgctgcagaagttcgacgaggacggcttcaaggagtgcaacctgaacgacacccggtacgtgaaccggttcctgtgccagttcgtggccgaccacatcctgctgaccggcaagggcaagcggcgggtgttcgcctccaacggccagatcaccaacctgctgcggggcttctggggcctgcggaaggtgcgggccgagaacgaccggcaccacgccctggacgccgtggtggtggcctgctccaccgtggccatgcagcagaagatcacccggttcgtgcggtacaaggagatgaacgccttcgacggcaagaccatcgacaaggagaccggcaaggtgctgcaccagaagacccacttcccccagccctgggagttcttcgcccaggaggtgatgatccgggtgttcggcaagcccgacggcaagcccgagttcgaggaggccgacacccccgagaagctgcggaccctgctggccgagaagctgtcctcccggcccgaggccgtgcacgagtacgtgacccccctgttcgtgtcccgggcccccaaccggaagatgtccggcgcccacaaggacaccctgcggtccgccaagcggttcgtgaagcacaacgagaagatctccgtgaagcgggtgtggctgaccgagatcaagctggccgacctggagaacatggtgaactacaagaacggccgggagatcgagctgtacgaggccctgaaggcccggctggaggcctacggcggcaacgccaagcaggccttcgaccccaaggacaaccccttctacaagaagggcggccagctggtgaaggccgtgcgggtggagaagacccaggagtccggcgtgctgctgaacaagaagaacgcctacaccatcgccgacaacggcgacatggtgcgggtggacgtgttctgcaaggtggacaagaagggcaagaaccagtacttcatcgtgcccatctacgcctggcaggtggccgagaacatcctgcccgacatcgactgcaagggctaccggatcgacgactcctacaccttctgcttctccctgcacaagtacgacctgatcgccttccagaaggacgagaagtccaaggtggagttcgcctactacatcaactgcgactcctccaacggccggttctacctggcctggcacgacaagggctccaaggagcagcagttccggatctccacccagaacctggtgctgatccagaagtaccaggtgaacgagctgggcaaggagatccggccctgccggctgaagaagcggccccccgtgcggtccggcaagcggaccgccgacggctccggcggcggctcccccaagaagaagcggaaggtggagtag

SEQ ID NO: 40 - protein, 2552 aa, synthetic construct
  REGION 1..2552: note = Synthetic: Cas9-Cas9 fusion(mRNA L)-amino acid sequence
MDKKYSIGLDIGTNSVGWAVITDEYKVPSKKFKVLGNTDRHSIKKNLIGALLFDSGETAEATRLKRTARRRYTRRKNRICYLQEIFSNEMAKVDDSFFHRLEESFLVEEDKKHERHPIFGNIVDEVAYHEKYPTIYHLRKKLVDSTDKADLRLIYLALAHMIKFRGHFLIEGDLNPDNSDVDKLFIQLVQTYNQLFEENPINASGVDAKAILSARLSKSRRLENLIAQLPGEKKNGLFGNLIALSLGLTPNFKSNFDLAEDAKLQLSKDTYDDDLDNLLAQIGDQYADLFLAAKNLSDAILLSDILRVNTEITKAPLSASMIKRYDEHHQDLTLLKALVRQQLPEKYKEIFFDQSKNGYAGYIDGGASQEEFYKFIKPILEKMDGTEELLVKLNREDLLRKQRTFDNGSIPHQIHLGELHAILRRQEDFYPFLKDNREKIEKILTFRIPYYVGPLARGNSRFAWMTRKSEETITPWNFEEVVDKGASAQSFIERMTNFDKNLPNEKVLPKHSLLYEYFTVYNELTKVKYVTEGMRKPAFLSGEQKKAIVDLLFKTNRKVTVKQLKEDYFKKIECFDSVEISGVEDRFNASLGTYHDLLKIIKDKDFLDNEENEDILEDIVLTLTLFEDREMIEERLKTYAHLFDDKVMKQLKRRRYTGWGRLSRKLINGIRDKQSGKTILDFLKSDGFANRNFMQLIHDDSLTFKEDIQKAQVSGQGDSLHEHIANLAGSPAIKKGILQTVKVVDELVKVMGRHKPENIVIEMARENQTTQKGQKNSRERMKRIEEGIKELGSQILKEHPVENTQLQNEKLYLYYLQNGRDMYVDQELDINRLSDYDVDHIVPQSFLKDDSIDNKVLTRSDKNRGKSDNVPSEEVVKKMKNYWRQLLNAKLITQRKFDNLTKAERGGLSELDKAGFIKRQLVETRQITKHVAQILDSRMNTKYDENDKLIREVKVITLKSKLVSDFRKDFQFYKVREINNYHHAHDAYLNAVVGTALIKKYPKLESEFVYGDYKVYDVRKMIAKSEQEIGKATAKYFFYSNIMNFFKTEITLANGEIRKRPLIETNGETGEIVWDKGRDFATVRKVLSMPQVNIVKKTEVQTGGFSKESILPKRNSDKLIARKKDWDPKKYGGFDSPTVAYSVLVVAKVEKGKSKKLKSVKELLGITIMERSSFEKNPIDFLEAKGYKEVKKDLIIKLPKYSLFELENGRKRMLASAGELQKGNELALPSKYVNFLYLASHYEKLKGSPEDNEQKQLFVEQHKHYLDEIIEQISEFSKRVILADANLDKVLSAYNKHRDKPIREQAENIIHLFTLTNLGAPAAFKYFDTTIDKKRYTSTKEVLDATLIHQSITGLYETRIDLSQLGGDGAPESATESGGTSTESEGSAGTSTESEGSAGSAGSTSGGSGGGSGGSGSAGTSTESEGSAGTSESATESGGTSTESEGSSSGAAFKPNPINYILGLDIGIASVGWAMVEIDEEENPIRLIDLGVRVFERAEVPKTGDSLAMARRLARSVRRLTRRRAHRLLRARRLLKREGVLQAADFDENGLIKSLPNTPWQLRAAALDRKLTPLEWSAVLLHLIKHRGYLSQRKNEGETADKELGALLKGVANNAHALQTGDFRTPAELALNKFEKESGHIRNQRGDYSHTFSRKDLQAELILLFEKQKEFGNPHVSGGLKEGIETLLMTQRPALSGDAVQKMLGHCTFEPAEPKAAKNTYTAERFIWLTKLNNLRILEQGSERPLTDTERATLMDEPYRKSKLTYAQARKLLGLEDTAFFKGLRYGKDNAEASTLMEMKAYHAISRALEKEGLKDKKSPLNLSSELQDEIGTAFSLFKTDEDITGRLKDRVQPEILEALLKHISFDKFVQISLKALRRIVPLMEQGKRYDEACAEIYGDHYGKKNTEEKIYLPPIPADEIRNPVVLRALSQARKVINGVVRRYGSPARIHIETAREVGKSFKDRKEIEKRQEENRKDREKAAAKFREYFPNFVGEPKSKDILKLRLYEQQHGKCLYSGKEINLVRLNEKGYVEIDHALPFSRTWDDSFNNKVLVLGSENQNKGNQTPYEYFNGKDNSREWQEFKARVETSRFPRSKKQRILLQKFDEDGFKECNLNDTRYVNRFLCQFVADHILLTGKGKRRVFASNGQITNLLRGFWGLRKVRAENDRHHALDAVVVACSTVAMQQKITRFVRYKEMNAFDGKTIDKETGKVLHQKTHFPQPWEFFAQEVMIRVFGKPDGKPEFEEADTPEKLRTLLAEKLSSRPEAVHEYVTPLFVSRAPNRKMSGAHKDTLRSAKRFVKHNEKISVKRVWLTEIKLADLENMVNYKNGREIELYEALKARLEAYGGNAKQAFDPKDNPFYKKGGQLVKAVRVEKTQESGVLLNKKNAYTIADNGDMVRVDVFCKVDKKGKNQYFIVPIYAWQVAENILPDIDCKGYRIDDSYTFCFSLHKYDLIAFQKDEKSKVEFAYYINCDSSNGRFYLAWHDKGSKEQQFRISTQNLVLIQKYQVNELGKEIRPCRLKKRPPVRSGKRTADGSGGGSPKKKRKVE

SEQ ID NO: 41 - RNA, 8273 nt, synthetic construct
  misc_feature 1..8273: note = Synthetic: Cas9-Cas9 fusionwith HiBit tag (mRNA M)-mRNA sequence
  source 1..8273: mol_type = other RNA
gggaagctcagaataaacgctcaactttggccggatctgccaccatggacaagaagtactccatcggcctggacatcggcaccaactccgtgggctgggccgtgatcaccgacgagtacaaggtgccctccaagaagttcaaggtgctgggcaacaccgaccggcactccatcaagaagaacctgatcggcgccctgctgttcgactccggcgagaccgccgaggccacccggctgaagcggaccgcccggcggcggtacacccggcggaagaaccggatctgctacctgcaggagatcttctccaacgagatggccaaggtggacgactccttcttccaccggctggaggagtccttcctggtggaggaggacaagaagcacgagcggcaccccatcttcggcaacatcgtggacgaggtggcctaccacgagaagtaccccaccatctaccacctgcggaagaagctggtggactccaccgacaaggccgacctgcggctgatctacctggccctggcccacatgatcaagttccggggccacttcctgatcgagggcgacctgaaccccgacaactccgacgtggacaagctgttcatccagctggtgcagacctacaaccagctgttcgaggagaaccccatcaacgcctccggcgtggacgccaaggccatcctgtccgcccggctgtccaagtcccggcggctggagaacctgatcgcccagctgcccggcgagaagaagaacggcctgttcggcaacctgatcgccctgtccctgggcctgacccccaacttcaagtccaacttcgacctggccgaggacgccaagctgcagctgtccaaggacacctacgacgacgacctggacaacctgctggcccagatcggcgaccagtacgccgacctgttcctggccgccaagaacctgtccgacgccatcctgctgtccgacatcctgcgggtgaacaccgagatcaccaaggcccccctgtccgcctccatgatcaagcggtacgacgagcaccaccaggacctgaccctgctgaaggccctggtgcggcagcagctgcccgagaagtacaaggagatcttcttcgaccagtccaagaacggctacgccggctacatcgacggcggcgcctcccaggaggagttctacaagttcatcaagcccatcctggagaagatggacggcaccgaggagctgctggtgaagctgaaccgggaggacctgctgcggaagcagcggaccttcgacaacggctccatcccccaccagatccacctgggcgagctgcacgccatcctgcggcggcaggaggacttctaccccttcctgaaggacaaccgggagaagatcgagaagatcctgaccttccggatcccctactacgtgggccccctggcccggggcaactcccggttcgcctggatgacccggaagtccgaggagaccatcaccccctggaacttcgaggaggtggtggacaagggcgcctccgcccagtccttcatcgagcggatgaccaacttcgacaagaacctgcccaacgagaaggtgctgcccaagcactccctgctgtacgagtacttcaccgtgtacaacgagctgaccaaggtgaagtacgtgaccgagggcatgcggaagcccgccttcctgtccggcgagcagaagaaggccatcgtggacctgctgttcaagaccaaccggaaggtgaccgtgaagcagctgaaggaggactacttcaagaagatcgagtgcttcgactccgtggagatctccggcgtggaggaccggttcaacgcctccctgggcacctaccacgacctgctgaagatcatcaaggacaaggacttcctggacaacgaggagaacgaggacatcctggaggacatcgtgctgaccctgaccctgttcgaggaccgggagatgatcgaggagcggctgaagacctacgcccacctgttcgacgacaaggtgatgaagcagctgaagcggcggcggtacaccggctggggccggctgtcccggaagctgatcaacggcatccgggacaagcagtccggcaagaccatcctggacttcctgaagtccgacggcttcgccaaccggaacttcatgcagctgatccacgacgactccctgaccttcaaggaggacatccagaaggcccaggtgtccggccagggcgactccctgcacgagcacatcgccaacctggccggctcccccgccatcaagaagggcatcctgcagaccgtgaaggtggtggacgagctggtgaaggtgatgggccggcacaagcccgagaacatcgtgatcgagatggcccgggagaaccagaccacccagaagggccagaagaactcccgggagcggatgaagcggatcgaggagggcatcaaggagctgggctcccagatcctgaaggagcaccccgtggagaacacccagctgcagaacgagaagctgtacctgtactacctgcagaacggccgggacatgtacgtggaccaggagctggacatcaaccggctgtccgactacgacgtggaccacatcgtgccccagtccttcctgaaggacgactccatcgacaacaaggtgctgacccggtccgacaagaaccggggcaagtccgacaacgtgccctccgaggaggtggtgaagaagatgaagaactactggcggcagctgctgaacgccaagctgatcacccagcggaagttcgacaacctgaccaaggccgagcggggcggcctgtccgagctggacaaggccggcttcatcaagcggcagctggtggagacccggcagatcaccaagcacgtggcccagatcctggactcccggatgaacaccaagtacgacgagaacgacaagctgatccgggaggtgaaggtgatcaccctgaagtccaagctggtgtccgacttccggaaggacttccagttctacaaggtgcgggagatcaacaactaccaccacgcccacgacgcctacctgaacgccgtggtgggcaccgccctgatcaagaagtaccccaagctggagtccgagttcgtgtacggcgactacaaggtgtacgacgtgcggaagatgatcgccaagtccgagcaggagatcggcaaggccaccgccaagtacttcttctactccaacatcatgaacttcttcaagaccgagatcaccctggccaacggcgagatccggaagcggcccctgatcgagaccaacggcgagaccggcgagatcgtgtgggacaagggccgggacttcgccaccgtgcggaaggtgctgtccatgccccaggtgaacatcgtgaagaagaccgaggtgcagaccggcggcttctccaaggagtccatcctgcccaagcggaactccgacaagctgatcgcccggaagaaggactgggaccccaagaagtacggcggcttcgactcccccaccgtggcctactccgtgctggtggtggccaaggtggagaagggcaagtccaagaagctgaagtccgtgaaggagctgctgggcatcaccatcatggagcggtcctccttcgagaagaaccccatcgacttcctggaggccaagggctacaaggaggtgaagaaggacctgatcatcaagctgcccaagtactccctgttcgagctggagaacggccggaagcggatgctggcctccgccggcgagctgcagaagggcaacgagctggccctgccctccaagtacgtgaacttcctgtacctggcctcccactacgagaagctgaagggctcccccgaggacaacgagcagaagcagctgttcgtggagcagcacaagcactacctggacgagatcatcgagcagatctccgagttctccaagcgggtgatcctggccgacgccaacctggacaaggtgctgtccgcctacaacaagcaccgggacaagcccatccgggagcaggccgagaacatcatccacctgttcaccctgaccaacctgggcgcccccgccgccttcaagtacttcgacaccaccatcgacaagaagcggtacacctccaccaaggaggtgctggacgccaccctgatccaccagtccatcaccggcctgtacgagacccggatcgacctgtcccagctgggcggcgacggcgcccccgagtccgccaccgagtccggcggcacctccaccgagtccgagggctccgccggcacctccaccgagtccgagggctccgccggctccgccggctccacctccaccgaggagggcacctccaccgagtccgagggctccgccggcacctccaccgagtccgagggctccgccggcacctccgagtccgccaccgagtccggcggcacctccaccgagtccgagggctcctcctccggtgccgccttcaagcccaaccccatcaactacatcctgggcctggacatcggcatcgcctccgtgggctgggccatggtggagatcgacgaggaggagaaccccatccggctgatcgacctgggcgtgcgggtgttcgagcgggccgaggtgcccaagaccggcgactccctggccatggcccggcggctggcccggtccgtgcggcggctgacccggcggcgggcccaccggctgctgcgggcccggcggctgctgaagcgggagggcgtgctgcaggccgccgacttcgacgagaacggcctgatcaagtccctgcccaacaccccctggcagctgcgggccgccgccctggaccggaagctgacccccctggagtggtccgccgtgctgctgcacctgatcaagcaccggggctacctgtcccagcggaagaacgagggcgagaccgccgacaaggagctgggcgccctgctgaagggcgtggccaacaacgcccacgccctgcagaccggcgacttccggacccccgccgagctggccctgaacaagttcgagaaggagtccggccacatccggaaccagcggggcgactactcccacaccttctcccggaaggacctgcaggccgagctgatcctgctgttcgagaagcagaaggagttcggcaacccccacgtgtccggcggcctgaaggagggcatcgagaccctgctgatgacccagcggcccgccctgtccggcgacgccgtgcagaagatgctgggccactgcaccttcgagcccgccgagcccaaggccgccaagaacacctacaccgccgagcggttcatctggctgaccaagctgaacaacctgcggatcctggagcagggctccgagcggcccctgaccgacaccgagcgggccaccctgatggacgagccctaccggaagtccaagctgacctacgcccaggcccggaagctgctgggcctggaggacaccgccttcttcaagggcctgcggtacggcaaggacaacgccgaggcctccaccctgatggagatgaaggcctaccacgccatctcccgggccctggagaaggagggcctgaaggacaagaagtcccccctgaacctgtcctccgagctgcaggacgagatcggcaccgccttctccctgttcaagaccgacgaggacatcaccggccggctgaaggaccgggtgcagcccgagatcctggaggccctgctgaagcacatctccttcgacaagttcgtgcagatctccctgaaggccctgcggcggatcgtgcccctgatggagcagggcaagcggtacgacgaggcctgcgccgagatctacggcgaccactacggcaagaagaacaccgaggagaagatctacctgccccccatccccgccgacgagatccggaaccccgtggtgctgcgggccctgtcccaggcccggaaggtgatcaacggcgtggtgcggcggtacggctcccccgcccggatccacatcgagaccgcccgggaggtgggcaagtccttcaaggaccggaaggagatcgagaagcggcaggaggagaaccggaaggaccgggagaaggccgccgccaagttccgggagtacttccccaacttcgtgggcgagcccaagtccaaggacatcctgaagctgcggctgtacgagcagcagcacggcaagtgcctgtactccggcaaggagatcaacctggtgcggctgaacgagaagggctacgtggagatcgaccacgccctgcccttctcccggacctgggacgactccttcaacaacaaggtgctggtgctgggctccgagaaccagaacaagggcaaccagaccccctacgagtacttcaacggcaaggacaactcccgggagtggcaggagttcaaggcccgggtggagacctcccggttcccccggtccaagaagcagcggatcctgctgcagaagttcgacgaggacggcttcaaggagtgcaacctgaacgacacccggtacgtgaaccgcttcctgtgccagttcgtggccgaccacatcctgctgaccggcaagggcaagcggcgggtgttcgcctccaacggccagatcaccaacctgctgcggggcttctggggcctgcggaaggtgcgggccgagaacgaccggcaccacgccctggacgccgtggtggtggcctgctccaccgtggccatgcagcagaagatcacccggttcgtgcggtacaaggagatgaacgccttcgacggcaagaccatcgacaaggagaccggcaaggtgctgcaccagaagacccacttcccccagccctgggagttcttcgcccaggaggtgatgatccgggtgttcggcaagcccgacggcaagcccgagttcgaggaggccgacacccccgagaagctgcggaccctgctggccgagaagctgtcctcccggcccgaggccgtgcacgagtacgtgacccccctgttcgtgtcccgggcccccaaccggaagatgtccggcgcccacaaggacaccctgcggtccgccaagcggttcgtgaagcacaacgagaagatctccgtgaagcgggtgtggctgaccgagatcaagctggccgacctggagaacatggtgaactacaagaacggccgggagatcgagctgtacgaggccctgaaggcccggctggaggcctacggcggcaacgccaagcaggccttcgaccccaaggacaaccccttctacaagaagggcggccagctggtgaaggccgtgcgggtggagaagacccaggagtccggcgtgctgctgaacaagaagaacgcctacaccatcgccgacaacggcgacatggtgcgggtggacgtgttctgcaaggtggacaagaagggcaagaaccagtacttcatcgtgcccatctacgcctggcaggtggccgagaacatcctgcccgacatcgactgcaagggctaccggatcgacgactcctacaccttctgcttctccctgcacaagtacgacctgatcgccttccagaaggacgagaagtccaaggtggagttcgcctactacatcaactgcgactcctccaacggccggttctacctggcctggcacgacaagggctccaaggagcagcagttccggatctccacccagaacctggtgctgatccagaagtaccaggtgaacgagctgggcaaggagatccggccctgccggctgaagaagcggccccccgtgcggtccggaaagcggaccgccgacggctccggaggaggaagcccgaagaagaagagaaaggtcagcgaaagcgcaacaccggaaagcgtcagcggatggagactgttcaagaagatcagctagctagcaccagcctcaagaacacccgaatggagtctctaagctacataataccaacttacactttacaaaatgttgtcccccaaaatgtagccattcgtatctgctcctaataaaaagaaagtttcttcacattctctcgagaaaaaaaaaaaatggaaaaaaaaaaaacggaaaaaaaaaaaaggtaaaaaaaaaaaatataaaaaaaaaaaacataaaaaaaaaaaacgaaaaaaaaaaaacgtaaaaaaaaaaaactcaaaaaaaaaaaagataaaaaaaaaaaacctaaaaaaaaaaaatgtaaaaaaaaaaaagggaaaaaaaaaaaacgcaaaaaaaaaaaacacaaaaaaaaaaaatgcaaaaaaaaaaaatcgaaaaaaaaaaaatctaaaaaaaaaaaacgaaaaaaaaaaaacccaaaaaaaaaaaagacaaaaaaaaaaaatagaaaaaaaaaaaagttaaaaaaaaaaaactgaaaaaaaaaaaatttaaaaaaaaaaaatctag

SEQ ID NO: 42 - RNA, 7713 nt, synthetic construct
  misc_feature 1..7713: note = Synthetic: Cas9-Cas9 fusionwith HiBit tag (mRNA M)-ORF sequence
  source 1..7713: mol_type = other RNA
atggacaagaagtactccatcggcctggacatcggcaccaactccgtgggctgggccgtgatcaccgacgagtacaaggtgccctccaagaagttcaaggtgctgggcaacaccgaccggcactccatcaagaagaacctgatcggcgccctgctgttcgactccggcgagaccgccgaggccacccggctgaagcggaccgcccggcggcggtacacccggcggaagaaccggatctgctacctgcaggagatcttctccaacgagatggccaaggtggacgactccttcttccaccggctggaggagtccttcctggtggaggaggacaagaagcacgagcggcaccccatcttcggcaacatcgtggacgaggtggcctaccacgagaagtaccccaccatctaccacctgcggaagaagctggtggactccaccgacaaggccgacctgcggctgatctacctggccctggcccacatgatcaagttccggggccacttcctgatcgagggcgacctgaaccccgacaactccgacgtggacaagctgttcatccagctggtgcagacctacaaccagctgttcgaggagaaccccatcaacgcctccggcgtggacgccaaggccatcctgtccgcccggctgtccaagtcccggcggctggagaacctgatcgcccagctgcccggcgagaagaagaacggcctgttcggcaacctgatcgccctgtccctgggcctgacccccaacttcaagtccaacttcgacctggccgaggacgccaagctgcagctgtccaaggacacctacgacgacgacctggacaacctgctggcccagatcggcgaccagtacgccgacctgttcctggccgccaagaacctgtccgacgccatcctgctgtccgacatcctgcgggtgaacaccgagatcaccaaggcccccctgtccgcctccatgatcaagcggtacgacgagcaccaccaggacctgaccctgctgaaggccctggtgcggcagcagctgcccgagaagtacaaggagatcttcttcgaccagtccaagaacggctacgccggctacatcgacggcggcgcctcccaggaggagttctacaagttcatcaagcccatcctggagaagatggacggcaccgaggagctgctggtgaagctgaaccgggaggacctgctgcggaagcagcggaccttcgacaacggctccatcccccaccagatccacctgggcgagctgcacgccatcctgcggcggcaggaggacttctaccccttcctgaaggacaaccgggagaagatcgagaagatcctgaccttccggatcccctactacgtgggccccctggcccggggcaactcccggttcgcctggatgacccggaagtccgaggagaccatcaccccctggaacttcgaggaggtggtggacaagggcgcctccgcccagtccttcatcgagcggatgaccaacttcgacaagaacctgcccaacgagaaggtgctgcccaagcactccctgctgtacgagtacttcaccgtgtacaacgagctgaccaaggtgaagtacgtgaccgagggcatgcggaagcccgccttcctgtccggcgagcagaagaaggccatcgtggacctgctgttcaagaccaaccggaaggtgaccgtgaagcagctgaaggaggactacttcaagaagatcgagtgcttcgactccgtggagatctccggcgtggaggaccggttcaacgcctccctgggcacctaccacgacctgctgaagatcatcaaggacaaggacttcctggacaacgaggagaacgaggacatcctggaggacatcgtgctgaccctgaccctgttcgaggaccgggagatgatcgaggagcggctgaagacctacgcccacctgttcgacgacaaggtgatgaagcagctgaagcggcggcggtacaccggctggggccggctgtcccggaagctgatcaacggcatccgggacaagcagtccggcaagaccatcctggacttcctgaagtccgacggcttcgccaaccggaacttcatgcagctgatccacgacgactccctgaccttcaaggaggacatccagaaggcccaggtgtccggccagggcgactccctgcacgagcacatcgccaacctggccggctcccccgccatcaagaagggcatcctgcagaccgtgaaggtggtggacgagctggtgaaggtgatgggccggcacaagcccgagaacatcgtgatcgagatggcccgggagaaccagaccacccagaagggccagaagaactcccgggagcggatgaagcggatcgaggagggcatcaaggagctgggctcccagatcctgaaggagcaccccgtggagaacacccagctgcagaacgagaagctgtacctgtactacctgcagaacggccgggacatgtacgtggaccaggagctggacatcaaccggctgtccgactacgacgtggaccacatcgtgccccagtccttcctgaaggacgactccatcgacaacaaggtgctgacccggtccgacaagaaccggggcaagtccgacaacgtgccctccgaggaggtggtgaagaagatgaagaactactggcggcagctgctgaacgccaagctgatcacccagcggaagttcgacaacctgaccaaggccgagcggggcggcctgtccgagctggacaaggccggcttcatcaagcggcagctggtggagacccggcagatcaccaagcacgtggcccagatcctggactcccggatgaacaccaagtacgacgagaacgacaagctgatccgggaggtgaaggtgatcaccctgaagtccaagctggtgtccgacttccggaaggacttccagttctacaaggtgcgggagatcaacaactaccaccacgcccacgacgcctacctgaacgccgtggtgggcaccgccctgatcaagaagtaccccaagctggagtccgagttcgtgtacggcgactacaaggtgtacgacgtgcggaagatgatcgccaagtccgagcaggagatcggcaaggccaccgccaagtacttcttctactccaacatcatgaacttcttcaagaccgagatcaccctggccaacggcgagatccggaagcggcccctgatcgagaccaacggcgagaccggcgagatcgtgtgggacaagggccgggacttcgccaccgtgcggaaggtgctgtccatgccccaggtgaacatcgtgaagaagaccgaggtgcagaccggcggcttctccaaggagtccatcctgcccaagcggaactccgacaagctgatcgcccggaagaaggactgggaccccaagaagtacggcggcttcgactcccccaccgtggcctactccgtgctggtggtggccaaggtggagaagggcaagtccaagaagctgaagtccgtgaaggagctgctgggcatcaccatcatggagcggtcctccttcgagaagaaccccatcgacttcctggaggccaagggctacaaggaggtgaagaaggacctgatcatcaagctgcccaagtactccctgttcgagctggagaacggccggaagcggatgctggcctccgccggcgagctgcagaagggcaacgagctggccctgccctccaagtacgtgaacttcctgtacctggcctcccactacgagaagctgaagggctcccccgaggacaacgagcagaagcagctgttcgtggagcagcacaagcactacctggacgagatcatcgagcagatctccgagttctccaagcgggtgatcctggccgacgccaacctggacaaggtgctgtccgcctacaacaagcaccgggacaagcccatccgggagcaggccgagaacatcatccacctgttcaccctgaccaacctgggcgcccccgccgccttcaagtacttcgacaccaccatcgacaagaagcggtacacctccaccaaggaggtgctggacgccaccctgatccaccagtccatcaccggcctgtacgagacccggatcgacctgtcccagctgggcggcgacggcgcccccgagtccgccaccgagtccggcggcacctccaccgagtccgagggctccgccggcacctccaccgagtccgagggctccgccggctccgccggctccacctccaccgaggagggcacctccaccgagtccgagggctccgccggcacctccaccgagtccgagggctccgccggcacctccgagtccgccaccgagtccggcggcacctccaccgagtccgagggctcctcctccggtgccgccttcaagcccaaccccatcaactacatcctgggcctggacatcggcatcgcctccgtgggctgggccatggtggagatcgacgaggaggagaaccccatccggctgatcgacctgggcgtgcgggtgttcgagcgggccgaggtgcccaagaccggcgactccctggccatggcccggcggctggcccggtccgtgcggcggctgacccggcggcgggcccaccggctgctgcgggcccggcggctgctgaagcgggagggcgtgctgcaggccgccgacttcgacgagaacggcctgatcaagtccctgcccaacaccccctggcagctgcgggccgccgccctggaccggaagctgacccccctggagtggtccgccgtgctgctgcacctgatcaagcaccggggctacctgtcccagcggaagaacgagggcgagaccgccgacaaggagctgggcgccctgctgaagggcgtggccaacaacgcccacgccctgcagaccggcgacttccggacccccgccgagctggccctgaacaagttcgagaaggagtccggccacatccggaaccagcggggcgactactcccacaccttctcccggaaggacctgcaggccgagctgatcctgctgttcgagaagcagaaggagttcggcaacccccacgtgtccggcggcctgaaggagggcatcgagaccctgctgatgacccagcggcccgccctgtccggcgacgccgtgcagaagatgctgggccactgcaccttcgagcccgccgagcccaaggccgccaagaacacctacaccgccgagcggttcatctggctgaccaagctgaacaacctgcggatcctggagcagggctccgagcggcccctgaccgacaccgagcgggccaccctgatggacgagccctaccggaagtccaagctgacctacgcccaggcccggaagctgctgggcctggaggacaccgccttcttcaagggcctgcggtacggcaaggacaacgccgaggcctccaccctgatggagatgaaggcctaccacgccatctcccgggccctggagaaggagggcctgaaggacaagaagtcccccctgaacctgtcctccgagctgcaggacgagatcggcaccgccttctccctgttcaagaccgacgaggacatcaccggccggctgaaggaccgggtgcagcccgagatcctggaggccctgctgaagcacatctccttcgacaagttcgtgcagatctccctgaaggccctgcggcggatcgtgcccctgatggagcagggcaagcggtacgacgaggcctgcgccgagatctacggcgaccactacggcaagaagaacaccgaggagaagatctacctgccccccatccccgccgacgagatccggaaccccgtggtgctgcgggccctgtcccaggcccggaaggtgatcaacggcgtggtgcggcggtacggctcccccgcccggatccacatcgagaccgcccgggaggtgggcaagtccttcaaggaccggaaggagatcgagaagcggcaggaggagaaccggaaggaccgggagaaggccgccgccaagttccgggagtacttccccaacttcgtgggcgagcccaagtccaaggacatcctgaagctgcggctgtacgagcagcagcacggcaagtgcctgtactccggcaaggagatcaacctggtgcggctgaacgagaagggctacgtggagatcgaccacgccctgcccttctcccggacctgggacgactccttcaacaacaaggtgctggtgctgggctccgagaaccagaacaagggcaaccagaccccctacgagtacttcaacggcaaggacaactcccgggagtggcaggagttcaaggcccgggtggagacctcccggttcccccggtccaagaagcagcggatcctgctgcagaagttcgacgaggacggcttcaaggagtgcaacctgaacgacacccggtacgtgaaccgcttcctgtgccagttcgtggccgaccacatcctgctgaccggcaagggcaagcggcgggtgttcgcctccaacggccagatcaccaacctgctgcggggcttctggggcctgcggaaggtgcgggccgagaacgaccggcaccacgccctggacgccgtggtggtggcctgctccaccgtggccatgcagcagaagatcacccggttcgtgcggtacaaggagatgaacgccttcgacggcaagaccatcgacaaggagaccggcaaggtgctgcaccagaagacccacttcccccagccctgggagttcttcgcccaggaggtgatgatccgggtgttcggcaagcccgacggcaagcccgagttcgaggaggccgacacccccgagaagctgcggaccctgctggccgagaagctgtcctcccggcccgaggccgtgcacgagtacgtgacccccctgttcgtgtcccgggcccccaaccggaagatgtccggcgcccacaaggacaccctgcggtccgccaagcggttcgtgaagcacaacgagaagatctccgtgaagcgggtgtggctgaccgagatcaagctggccgacctggagaacatggtgaactacaagaacggccgggagatcgagctgtacgaggccctgaaggcccggctggaggcctacggcggcaacgccaagcaggccttcgaccccaaggacaaccccttctacaagaagggcggccagctggtgaaggccgtgcgggtggagaagacccaggagtccggcgtgctgctgaacaagaagaacgcctacaccatcgccgacaacggcgacatggtgcgggtggacgtgttctgcaaggtggacaagaagggcaagaaccagtacttcatcgtgcccatctacgcctggcaggtggccgagaacatcctgcccgacatcgactgcaagggctaccggatcgacgactcctacaccttctgcttctccctgcacaagtacgacctgatcgccttccagaaggacgagaagtccaaggtggagttcgcctactacatcaactgcgactcctccaacggccggttctacctggcctggcacgacaagggctccaaggagcagcagttccggatctccacccagaacctggtgctgatccagaagtaccaggtgaacgagctgggcaaggagatccggccctgccggctgaagaagcggccccccgtgcggtccggaaagcggaccgccgacggctccggaggaggaagcccgaagaagaagagaaaggtcagcgaaagcgcaacaccggaaagcgtcagcggatggagactgttcaagaagatcagctag

SEQ ID NO: 43 - protein, 2570 aa, synthetic construct
  REGION 1..2570: note = Synthetic: Cas9-Cas9 fusion with HiBit tag (mRNA M)-amino acid sequence
MDKKYSIGLDIGTNSVGWAVITDEYKVPSKKFKVLGNTDRHSIKKNLIGALLFDSGETAEATRLKRTARRRYTRRKNRICYLQEIFSNEMAKVDDSFFHRLEESFLVEEDKKHERHPIFGNIVDEVAYHEKYPTIYHLRKKLVDSTDKADLRLIYLALAHMIKFRGHFLIEGDLNPDNSDVDKLFIQLVQTYNQLFEENPINASGVDAKAILSARLSKSRRLENLIAQLPGEKKNGLFGNLIALSLGLTPNFKSNFDLAEDAKLQLSKDTYDDDLDNLLAQIGDQYADLFLAAKNLSDAILLSDILRVNTEITKAPLSASMIKRYDEHHQDLTLLKALVRQQLPEKYKEIFFDQSKNGYAGYIDGGASQEEFYKFIKPILEKMDGTEELLVKLNREDLLRKQRTFDNGSIPHQIHLGELHAILRRQEDFYPFLKDNREKIEKILTFRIPYYVGPLARGNSRFAWMTRKSEETITPWNFEEVVDKGASAQSFIERMTNFDKNLPNEKVLPKHSLLYEYFTVYNELTKVKYVTEGMRKPAFLSGEQKKAIVDLLFKTNRKVTVKQLKEDYFKKIECFDSVEISGVEDRFNASLGTYHDLLKIIKDKDFLDNEENEDILEDIVLTLTLFEDREMIEERLKTYAHLFDDKVMKQLKRRRYTGWGRLSRKLINGIRDKQSGKTILDFLKSDGFANRNFMQLIHDDSLTFKEDIQKAQVSGQGDSLHEHIANLAGSPAIKKGILQTVKVVDELVKVMGRHKPENIVIEMARENQTTQKGQKNSRERMKRIEEGIKELGSQILKEHPVENTQLQNEKLYLYYLQNGRDMYVDQELDINRLSDYDVDHIVPQSFLKDDSIDNKVLTRSDKNRGKSDNVPSEEVVKKMKNYWRQLLNAKLITQRKFDNLTKAERGGLSELDKAGFIKRQLVETRQITKHVAQILDSRMNTKYDENDKLIREVKVITLKSKLVSDFRKDFQFYKVREINNYHHAHDAYLNAVVGTALIKKYPKLESEFVYGDYKVYDVRKMIAKSEQEIGKATAKYFFYSNIMNFFKTEITLANGEIRKRPLIETNGETGEIVWDKGRDFATVRKVLSMPQVNIVKKTEVQTGGFSKESILPKRNSDKLIARKKDWDPKKYGGFDSPTVAYSVLVVAKVEKGKSKKLKSVKELLGITIMERSSFEKNPIDFLEAKGYKEVKKDLIIKLPKYSLFELENGRKRMLASAGELQKGNELALPSKYVNFLYLASHYEKLKGSPEDNEQKQLFVEQHKHYLDEIIEQISEFSKRVILADANLDKVLSAYNKHRDKPIREQAENIIHLFTLTNLGAPAAFKYFDTTIDKKRYTSTKEVLDATLIHQSITGLYETRIDLSQLGGDGAPESATESGGTSTESEGSAGTSTESEGSAGSAGSTSTEEGTSTESEGSAGTSTESEGSAGTSESATESGGTSTESEGSSSGAAFKPNPINYILGLDIGIASVGWAMVEIDEEENPIRLIDLGVRVFERAEVPKTGDSLAMARRLARSVRRLTRRRAHRLLRARRLLKREGVLQAADFDENGLIKSLPNTPWQLRAAALDRKLTPLEWSAVLLHLIKHRGYLSQRKNEGETADKELGALLKGVANNAHALQTGDFRTPAELALNKFEKESGHIRNQRGDYSHTFSRKDLQAELILLFEKQKEFGNPHVSGGLKEGIETLLMTQRPALSGDAVQKMLGHCTFEPAEPKAAKNTYTAERFIWLTKLNNLRILEQGSERPLTDTERATLMDEPYRKSKLTYAQARKLLGLEDTAFFKGLRYGKDNAEASTLMEMKAYHAISRALEKEGLKDKKSPLNLSSELQDEIGTAFSLFKTDEDITGRLKDRVQPEILEALLKHISFDKFVQISLKALRRIVPLMEQGKRYDEACAEIYGDHYGKKNTEEKIYLPPIPADEIRNPVVLRALSQARKVINGVVRRYGSPARIHIETAREVGKSFKDRKEIEKRQEENRKDREKAAAKFREYFPNFVGEPKSKDILKLRLYEQQHGKCLYSGKEINLVRLNEKGYVEIDHALPFSRTWDDSFNNKVLVLGSENQNKGNQTPYEYFNGKDNSREWQEFKARVETSRFPRSKKQRILLQKFDEDGFKECNLNDTRYVNRFLCQFVADHILLTGKGKRRVFASNGQITNLLRGFWGLRKVRAENDRHHALDAVVVACSTVAMQQKITRFVRYKEMNAFDGKTIDKETGKVLHQKTHFPQPWEFFAQEVMIRVFGKPDGKPEFEEADTPEKLRTLLAEKLSSRPEAVHEYVTPLFVSRAPNRKMSGAHKDTLRSAKRFVKHNEKISVKRVWLTEIKLADLENMVNYKNGREIELYEALKARLEAYGGNAKQAFDPKDNPFYKKGGQLVKAVRVEKTQESGVLLNKKNAYTIADNGDMVRVDVFCKVDKKGKNQYFIVPIYAWQVAENILPDIDCKGYRIDDSYTFCFSLHKYDLIAFQKDEKSKVEFAYYINCDSSNGRFYLAWHDKGSKEQQFRISTQNLVLIQKYQVNELGKEIRPCRLKKRPPVRSGKRTADGSGGGSPKKKRKVSESATPESVSGWRLFKKIS

SEQ ID NO: 44 - RNA, 7656 nt, synthetic construct
  misc_feature 1..7656: note = Synthetic: Cas9-Cas9 fusion (mRNA M)-ORF sequence
  source 1..7656: mol_type = other RNA
atggacaagaagtactccatcggcctggacatcggcaccaactccgtgggctgggccgtgatcaccgacgagtacaaggtgccctccaagaagttcaaggtgctgggcaacaccgaccggcactccatcaagaagaacctgatcggcgccctgctgttcgactccggcgagaccgccgaggccacccggctgaagcggaccgcccggcggcggtacacccggcggaagaaccggatctgctacctgcaggagatcttctccaacgagatggccaaggtggacgactccttcttccaccggctggaggagtccttcctggtggaggaggacaagaagcacgagcggcaccccatcttcggcaacatcgtggacgaggtggcctaccacgagaagtaccccaccatctaccacctgcggaagaagctggtggactccaccgacaaggccgacctgcggctgatctacctggccctggcccacatgatcaagttccggggccacttcctgatcgagggcgacctgaaccccgacaactccgacgtggacaagctgttcatccagctggtgcagacctacaaccagctgttcgaggagaaccccatcaacgcctccggcgtggacgccaaggccatcctgtccgcccggctgtccaagtcccggcggctggagaacctgatcgcccagctgcccggcgagaagaagaacggcctgttcggcaacctgatcgccctgtccctgggcctgacccccaacttcaagtccaacttcgacctggccgaggacgccaagctgcagctgtccaaggacacctacgacgacgacctggacaacctgctggcccagatcggcgaccagtacgccgacctgttcctggccgccaagaacctgtccgacgccatcctgctgtccgacatcctgcgggtgaacaccgagatcaccaaggcccccctgtccgcctccatgatcaagcggtacgacgagcaccaccaggacctgaccctgctgaaggccctggtgcggcagcagctgcccgagaagtacaaggagatcttcttcgaccagtccaagaacggctacgccggctacatcgacggcggcgcctcccaggaggagttctacaagttcatcaagcccatcctggagaagatggacggcaccgaggagctgctggtgaagctgaaccgggaggacctgctgcggaagcagcggaccttcgacaacggctccatcccccaccagatccacctgggcgagctgcacgccatcctgcggcggcaggaggacttctaccccttcctgaaggacaaccgggagaagatcgagaagatcctgaccttccggatcccctactacgtgggccccctggcccggggcaactcccggttcgcctggatgacccggaagtccgaggagaccatcaccccctggaacttcgaggaggtggtggacaagggcgcctccgcccagtccttcatcgagcggatgaccaacttcgacaagaacctgcccaacgagaaggtgctgcccaagcactccctgctgtacgagtacttcaccgtgtacaacgagctgaccaaggtgaagtacgtgaccgagggcatgcggaagcccgccttcctgtccggcgagcagaagaaggccatcgtggacctgctgttcaagaccaaccggaaggtgaccgtgaagcagctgaaggaggactacttcaagaagatcgagtgcttcgactccgtggagatctccggcgtggaggaccggttcaacgcctccctgggcacctaccacgacctgctgaagatcatcaaggacaaggacttcctggacaacgaggagaacgaggacatcctggaggacatcgtgctgaccctgaccctgttcgaggaccgggagatgatcgaggagcggctgaagacctacgcccacctgttcgacgacaaggtgatgaagcagctgaagcggcggcggtacaccggctggggccggctgtcccggaagctgatcaacggcatccgggacaagcagtccggcaagaccatcctggacttcctgaagtccgacggcttcgccaaccggaacttcatgcagctgatccacgacgactccctgaccttcaaggaggacatccagaaggcccaggtgtccggccagggcgactccctgcacgagcacatcgccaacctggccggctcccccgccatcaagaagggcatcctgcagaccgtgaaggtggtggacgagctggtgaaggtgatgggccggcacaagcccgagaacatcgtgatcgagatggcccgggagaaccagaccacccagaagggccagaagaactcccgggagcggatgaagcggatcgaggagggcatcaaggagctgggctcccagatcctgaaggagcaccccgtggagaacacccagctgcagaacgagaagctgtacctgtactacctgcagaacggccgggacatgtacgtggaccaggagctggacatcaaccggctgtccgactacgacgtggaccacatcgtgccccagtccttcctgaaggacgactccatcgacaacaaggtgctgacccggtccgacaagaaccggggcaagtccgacaacgtgccctccgaggaggtggtgaagaagatgaagaactactggcggcagctgctgaacgccaagctgatcacccagcggaagttcgacaacctgaccaaggccgagcggggcggcctgtccgagctggacaaggccggcttcatcaagcggcagctggtggagacccggcagatcaccaagcacgtggcccagatcctggactcccggatgaacaccaagtacgacgagaacgacaagctgatccgggaggtgaaggtgatcaccctgaagtccaagctggtgtccgacttccggaaggacttccagttctacaaggtgcgggagatcaacaactaccaccacgcccacgacgcctacctgaacgccgtggtgggcaccgccctgatcaagaagtaccccaagctggagtccgagttcgtgtacggcgactacaaggtgtacgacgtgcggaagatgatcgccaagtccgagcaggagatcggcaaggccaccgccaagtacttcttctactccaacatcatgaacttcttcaagaccgagatcaccctggccaacggcgagatccggaagcggcccctgatcgagaccaacggcgagaccggcgagatcgtgtgggacaagggccgggacttcgccaccgtgcggaaggtgctgtccatgccccaggtgaacatcgtgaagaagaccgaggtgcagaccggcggcttctccaaggagtccatcctgcccaagcggaactccgacaagctgatcgcccggaagaaggactgggaccccaagaagtacggcggcttcgactcccccaccgtggcctactccgtgctggtggtggccaaggtggagaagggcaagtccaagaagctgaagtccgtgaaggagctgctgggcatcaccatcatggagcggtcctccttcgagaagaaccccatcgacttcctggaggccaagggctacaaggaggtgaagaaggacctgatcatcaagctgcccaagtactccctgttcgagctggagaacggccggaagcggatgctggcctccgccggcgagctgcagaagggcaacgagctggccctgccctccaagtacgtgaacttcctgtacctggcctcccactacgagaagctgaagggctcccccgaggacaacgagcagaagcagctgttcgtggagcagcacaagcactacctggacgagatcatcgagcagatctccgagttctccaagcgggtgatcctggccgacgccaacctggacaaggtgctgtccgcctacaacaagcaccgggacaagcccatccgggagcaggccgagaacatcatccacctgttcaccctgaccaacctgggcgcccccgccgccttcaagtacttcgacaccaccatcgacaagaagcggtacacctccaccaaggaggtgctggacgccaccctgatccaccagtccatcaccggcctgtacgagacccggatcgacctgtcccagctgggcggcgacggcgcccccgagtccgccaccgagtccggcggcacctccaccgagtccgagggctccgccggcacctccaccgagtccgagggctccgccggctccgccggctccacctccaccgaggagggcacctccaccgagtccgagggctccgccggcacctccaccgagtccgagggctccgccggcacctccgagtccgccaccgagtccggcggcacctccaccgagtccgagggctcctcctccggtgccgccttcaagcccaaccccatcaactacatcctgggcctggacatcggcatcgcctccgtgggctgggccatggtggagatcgacgaggaggagaaccccatccggctgatcgacctgggcgtgcgggtgttcgagcgggccgaggtgcccaagaccggcgactccctggccatggcccggcggctggcccggtccgtgcggcggctgacccggcggcgggcccaccggctgctgcgggcccggcggctgctgaagcgggagggcgtgctgcaggccgccgacttcgacgagaacggcctgatcaagtccctgcccaacaccccctggcagctgcgggccgccgccctggaccggaagctgacccccctggagtggtccgccgtgctgctgcacctgatcaagcaccggggctacctgtcccagcggaagaacgagggcgagaccgccgacaaggagctgggcgccctgctgaagggcgtggccaacaacgcccacgccctgcagaccggcgacttccggacccccgccgagctggccctgaacaagttcgagaaggagtccggccacatccggaaccagcggggcgactactcccacaccttctcccggaaggacctgcaggccgagctgatcctgctgttcgagaagcagaaggagttcggcaacccccacgtgtccggcggcctgaaggagggcatcgagaccctgctgatgacccagcggcccgccctgtccggcgacgccgtgcagaagatgctgggccactgcaccttcgagcccgccgagcccaaggccgccaagaacacctacaccgccgagcggttcatctggctgaccaagctgaacaacctgcggatcctggagcagggctccgagcggcccctgaccgacaccgagcgggccaccctgatggacgagccctaccggaagtccaagctgacctacgcccaggcccggaagctgctgggcctggaggacaccgccttcttcaagggcctgcggtacggcaaggacaacgccgaggcctccaccctgatggagatgaaggcctaccacgccatctcccgggccctggagaaggagggcctgaaggacaagaagtcccccctgaacctgtcctccgagctgcaggacgagatcggcaccgccttctccctgttcaagaccgacgaggacatcaccggccggctgaaggaccgggtgcagcccgagatcctggaggccctgctgaagcacatctccttcgacaagttcgtgcagatctccctgaaggccctgcggcggatcgtgcccctgatggagcagggcaagcggtacgacgaggcctgcgccgagatctacggcgaccactacggcaagaagaacaccgaggagaagatctacctgccccccatccccgccgacgagatccggaaccccgtggtgctgcgggccctgtcccaggcccggaaggtgatcaacggcgtggtgcggcggtacggctcccccgcccggatccacatcgagaccgcccgggaggtgggcaagtccttcaaggaccggaaggagatcgagaagcggcaggaggagaaccggaaggaccgggagaaggccgccgccaagttccgggagtacttccccaacttcgtgggcgagcccaagtccaaggacatcctgaagctgcggctgtacgagcagcagcacggcaagtgcctgtactccggcaaggagatcaacctggtgcggctgaacgagaagggctacgtggagatcgaccacgccctgcccttctcccggacctgggacgactccttcaacaacaaggtgctggtgctgggctccgagaaccagaacaagggcaaccagaccccctacgagtacttcaacggcaaggacaactcccgggagtggcaggagttcaaggcccgggtggagacctcccggttcccccggtccaagaagcagcggatcctgctgcagaagttcgacgaggacggcttcaaggagtgcaacctgaacgacacccggtacgtgaaccgcttcctgtgccagttcgtggccgaccacatcctgctgaccggcaagggcaagcggcgggtgttcgcctccaacggccagatcaccaacctgctgcggggcttctggggcctgcggaaggtgcgggccgagaacgaccggcaccacgccctggacgccgtggtggtggcctgctccaccgtggccatgcagcagaagatcacccggttcgtgcggtacaaggagatgaacgccttcgacggcaagaccatcgacaaggagaccggcaaggtgctgcaccagaagacccacttcccccagccctgggagttcttcgcccaggaggtgatgatccgggtgttcggcaagcccgacggcaagcccgagttcgaggaggccgacacccccgagaagctgcggaccctgctggccgagaagctgtcctcccggcccgaggccgtgcacgagtacgtgacccccctgttcgtgtcccgggcccccaaccggaagatgtccggcgcccacaaggacaccctgcggtccgccaagcggttcgtgaagcacaacgagaagatctccgtgaagcgggtgtggctgaccgagatcaagctggccgacctggagaacatggtgaactacaagaacggccgggagatcgagctgtacgaggccctgaaggcccggctggaggcctacggcggcaacgccaagcaggccttcgaccccaaggacaaccccttctacaagaagggcggccagctggtgaaggccgtgcgggtggagaagacccaggagtccggcgtgctgctgaacaagaagaacgcctacaccatcgccgacaacggcgacatggtgcgggtggacgtgttctgcaaggtggacaagaagggcaagaaccagtacttcatcgtgcccatctacgcctggcaggtggccgagaacatcctgcccgacatcgactgcaagggctaccggatcgacgactcctacaccttctgcttctccctgcacaagtacgacctgatcgccttccagaaggacgagaagtccaaggtggagttcgcctactacatcaactgcgactcctccaacggccggttctacctggcctggcacgacaagggctccaaggagcagcagttccggatctccacccagaacctggtgctgatccagaagtaccaggtgaacgagctgggcaaggagatccggccctgccggctgaagaagcggccccccgtgcggtccggaaagcggaccgccgacggctccggaggaggaagcccgaagaagaagagaaaggtctag

SEQ ID NO: 45 - protein, 2551 aa, synthetic construct
  REGION 1..2551: note = Synthetic: Cas9-Cas9 fusion (mRNA M)-amino acid sequence
MDKKYSIGLDIGTNSVGWAVITDEYKVPSKKFKVLGNTDRHSIKKNLIGALLFDSGETAEATRLKRTARRRYTRRKNRICYLQEIFSNEMAKVDDSFFHRLEESFLVEEDKKHERHPIFGNIVDEVAYHEKYPTIYHLRKKLVDSTDKADLRLIYLALAHMIKFRGHFLIEGDLNPDNSDVDKLFIQLVQTYNQLFEENPINASGVDAKAILSARLSKSRRLENLIAQLPGEKKNGLFGNLIALSLGLTPNFKSNFDLAEDAKLQLSKDTYDDDLDNLLAQIGDQYADLFLAAKNLSDAILLSDILRVNTEITKAPLSASMIKRYDEHHQDLTLLKALVRQQLPEKYKEIFFDQSKNGYAGYIDGGASQEEFYKFIKPILEKMDGTEELLVKLNREDLLRKQRTFDNGSIPHQIHLGELHAILRRQEDFYPFLKDNREKIEKILTFRIPYYVGPLARGNSRFAWMTRKSEETITPWNFEEVVDKGASAQSFIERMTNFDKNLPNEKVLPKHSLLYEYFTVYNELTKVKYVTEGMRKPAFLSGEQKKAIVDLLFKTNRKVTVKQLKEDYFKKIECFDSVEISGVEDRFNASLGTYHDLLKIIKDKDFLDNEENEDILEDIVLTLTLFEDREMIEERLKTYAHLFDDKVMKQLKRRRYTGWGRLSRKLINGIRDKQSGKTILDFLKSDGFANRNFMQLIHDDSLTFKEDIQKAQVSGQGDSLHEHIANLAGSPAIKKGILQTVKVVDELVKVMGRHKPENIVIEMARENQTTQKGQKNSRERMKRIEEGIKELGSQILKEHPVENTQLQNEKLYLYYLQNGRDMYVDQELDINRLSDYDVDHIVPQSFLKDDSIDNKVLTRSDKNRGKSDNVPSEEVVKKMKNYWRQLLNAKLITQRKFDNLTKAERGGLSELDKAGFIKRQLVETRQITKHVAQILDSRMNTKYDENDKLIREVKVITLKSKLVSDFRKDFQFYKVREINNYHHAHDAYLNAVVGTALIKKYPKLESEFVYGDYKVYDVRKMIAKSEQEIGKATAKYFFYSNIMNFFKTEITLANGEIRKRPLIETNGETGEIVWDKGRDFATVRKVLSMPQVNIVKKTEVQTGGFSKESILPKRNSDKLIARKKDWDPKKYGGFDSPTVAYSVLVVAKVEKGKSKKLKSVKELLGITIMERSSFEKNPIDFLEAKGYKEVKKDLIIKLPKYSLFELENGRKRMLASAGELQKGNELALPSKYVNFLYLASHYEKLKGSPEDNEQKQLFVEQHKHYLDEIIEQISEFSKRVILADANLDKVLSAYNKHRDKPIREQAENIIHLFTLTNLGAPAAFKYFDTTIDKKRYTSTKEVLDATLIHQSITGLYETRIDLSQLGGDGAPESATESGGTSTESEGSAGTSTESEGSAGSAGSTSTEEGTSTESEGSAGTSTESEGSAGTSESATESGGTSTESEGSSSGAAFKPNPINYILGLDIGIASVGWAMVEIDEEENPIRLIDLGVRVFERAEVPKTGDSLAMARRLARSVRRLTRRRAHRLLRARRLLKREGVLQAADFDENGLIKSLPNTPWQLRAAALDRKLTPLEWSAVLLHLIKHRGYLSQRKNEGETADKELGALLKGVANNAHALQTGDFRTPAELALNKFEKESGHIRNQRGDYSHTFSRKDLQAELILLFEKQKEFGNPHVSGGLKEGIETLLMTQRPALSGDAVQKMLGHCTFEPAEPKAAKNTYTAERFIWLTKLNNLRILEQGSERPLTDTERATLMDEPYRKSKLTYAQARKLLGLEDTAFFKGLRYGKDNAEASTLMEMKAYHAISRALEKEGLKDKKSPLNLSSELQDEIGTAFSLFKTDEDITGRLKDRVQPEILEALLKHISFDKFVQISLKALRRIVPLMEQGKRYDEACAEIYGDHYGKKNTEEKIYLPPIPADEIRNPVVLRALSQARKVINGVVRRYGSPARIHIETAREVGKSFKDRKEIEKRQEENRKDREKAAAKFREYFPNFVGEPKSKDILKLRLYEQQHGKCLYSGKEINLVRLNEKGYVEIDHALPFSRTWDDSFNNKVLVLGSENQNKGNQTPYEYFNGKDNSREWQEFKARVETSRFPRSKKQRILLQKFDEDGFKECNLNDTRYVNRFLCQFVADHILLTGKGKRRVFASNGQITNLLRGFWGLRKVRAENDRHHALDAVVVACSTVAMQQKITRFVRYKEMNAFDGKTIDKETGKVLHQKTHFPQPWEFFAQEVMIRVFGKPDGKPEFEEADTPEKLRTLLAEKLSSRPEAVHEYVTPLFVSRAPNRKMSGAHKDTLRSAKRFVKHNEKISVKRVWLTEIKLADLENMVNYKNGREIELYEALKARLEAYGGNAKQAFDPKDNPFYKKGGQLVKAVRVEKTQESGVLLNKKNAYTIADNGDMVRVDVFCKVDKKGKNQYFIVPIYAWQVAENILPDIDCKGYRIDDSYTFCFSLHKYDLIAFQKDEKSKVEFAYYINCDSSNGRFYLAWHDKGSKEQQFRISTQNLVLIQKYQVNELGKEIRPCRLKKRPPVRSGKRTADGSGGGSPKKKRKV

SEQ ID NO: 46 - RNA, 7659 nt, synthetic construct
  misc_feature 1..7659: note = Synthetic: R1333 WT Cas9-Cas9 fusion PA1-4 (mRNA N) - ORF sequence (Example 4)
  source 1..7659: mol_type = other RNA
atggacaagaagtactccatcggcctggacatcggcaccaactccgtgggctgggccgtgatcaccgacgagtacaaggtgccctccaagaagttcaaggtgctgggcaacaccgaccggcactccatcaagaagaacctgatcggcgccctgctgttcgactccggcgagaccgccgaggccacccggctgaagcggaccgcccggcggcggtacacccggcggaagaaccggatctgctacctgcaggagatcttctccaacgagatggccaaggtggacgactccttcttccaccggctggaggagtccttcctggtggaggaggacaagaagcacgagcggcaccccatcttcggcaacatcgtggacgaggtggcctaccacgagaagtaccccaccatctaccacctgcggaagaagctggtggactccaccgacaaggccgacctgcggctgatctacctggccctggcccacatgatcaagttccggggccacttcctgatcgagggcgacctgaaccccgacaactccgacgtggacaagctgttcatccagctggtgcagacctacaaccagctgttcgaggagaaccccatcaacgcctccggcgtggacgccaaggccatcctgtccgcccggctgtccaagtcccggcggctggagaacctgatcgcccagctgcccggcgagaagaagaacggcctgttcggcaacctgatcgccctgtccctgggcctgacccccaacttcaagtccaacttcgacctggccgaggacgccaagctgcagctgtccaaggacacctacgacgacgacctggacaacctgctggcccagatcggcgaccagtacgccgacctgttcctggccgccaagaacctgtccgacgccatcctgctgtccgacatcctgcgggtgaacaccgagatcaccaaggcccccctgtccgcctccatgatcaagcggtacgacgagcaccaccaggacctgaccctgctgaaggccctggtgcggcagcagctgcccgagaagtacaaggagatcttcttcgaccagtccaagaacggctacgccggctacatcgacggcggcgcctcccaggaggagttctacaagttcatcaagcccatcctggagaagatggacggcaccgaggagctgctggtgaagctgaaccgggaggacctgctgcggaagcagcggaccttcgacaacggctccatcccccaccagatccacctgggcgagctgcacgccatcctgcggcggcaggaggacttctaccccttcctgaaggacaaccgggagaagatcgagaagatcctgaccttccggatcccctactacgtgggccccctggcccggggcaactcccggttcgcctggatgacccggaagtccgaggagaccatcaccccctggaacttcgaggaggtggtggacaagggcgcctccgcccagtccttcatcgagcggatgaccaacttcgacaagaacctgcccaacgagaaggtgctgcccaagcactccctgctgtacgagtacttcaccgtgtacaacgagctgaccaaggtgaagtacgtgaccgagggcatgcggaagcccgccttcctgtccggcgagcagaagaaggccatcgtggacctgctgttcaagaccaaccggaaggtgaccgtgaagcagctgaaggaggactacttcaagaagatcgagtgcttcgactccgtggagatctccggcgtggaggaccggttcaacgcctccctgggcacctaccacgacctgctgaagatcatcaaggacaaggacttcctggacaacgaggagaacgaggacatcctggaggacatcgtgctgaccctgaccctgttcgaggaccgggagatgatcgaggagcggctgaagacctacgcccacctgttcgacgacaaggtgatgaagcagctgaagcggcggcggtacaccggctggggccggctgtcccggaagctgatcaacggcatccgggacaagcagtccggcaagaccatcctggacttcctgaagtccgacggcttcgccaaccggaacttcatgcagctgatccacgacgactccctgaccttcaaggaggacatccagaaggcccaggtgtccggccagggcgactccctgcacgagcacatcgccaacctggccggctcccccgccatcaagaagggcatcctgcagaccgtgaaggtggtggacgagctggtgaaggtgatgggccggcacaagcccgagaacatcgtgatcgagatggcccgggagaaccagaccacccagaagggccagaagaactcccgggagcggatgaagcggatcgaggagggcatcaaggagctgggctcccagatcctgaaggagcaccccgtggagaacacccagctgcagaacgagaagctgtacctgtactacctgcagaacggccgggacatgtacgtggaccaggagctggacatcaaccggctgtccgactacgacgtggaccacatcgtgccccagtccttcctgaaggacgactccatcgacaacaaggtgctgacccggtccgacaagaaccggggcaagtccgacaacgtgccctccgaggaggtggtgaagaagatgaagaactactggcggcagctgctgaacgccaagctgatcacccagcggaagttcgacaacctgaccaaggccgagcggggcggcctgtccgagctggacaaggccggcttcatcaagcggcagctggtggagacccggcagatcaccaagcacgtggcccagatcctggactcccggatgaacaccaagtacgacgagaacgacaagctgatccgggaggtgaaggtgatcaccctgaagtccaagctggtgtccgacttccggaaggacttccagttctacaaggtgcgggagatcaacaactaccaccacgcccacgacgcctacctgaacgccgtggtgggcaccgccctgatcaagaagtaccccaagctggagtccgagttcgtgtacggcgactacaaggtgtacgacgtgcggaagatgatcgccaagtccgagcaggagatcggcaaggccaccgccaagtacttcttctactccaacatcatgaacttcttcaagaccgagatcaccctggccaacggcgagatccggaagcggcccctgatcgagaccaacggcgagaccggcgagatcgtgtgggacaagggccgggacttcgccaccgtgcggaaggtgctgtccatgccccaggtgaacatcgtgaagaagaccgaggtgcagaccggcggcttctccaaggagtccatcctgcccaagcggaactccgacaagctgatcgcccggaagaaggactgggaccccaagaagtacggcggcttcgactcccccaccgtggcctactccgtgctggtggtggccaaggtggagaagggcaagtccaagaagctgaagtccgtgaaggagctgctgggcatcaccatcatggagcggtcctccttcgagaagaaccccatcgacttcctggaggccaagggctacaaggaggtgaagaaggacctgatcatcaagctgcccaagtactccctgttcgagctggagaacggccggaagcggatgctggcctccgccggcgagctgcagaagggcaacgagctggccctgccctccaagtacgtgaacttcctgtacctggcctcccactacgagaagctgaagggctcccccgaggacaacgagcagaagcagctgttcgtggagcagcacaagcactacctggacgagatcatcgagcagatctccgagttctccaagcgggtgatcctggccgacgccaacctggacaaggtgctgtccgcctacaacaagcaccgggacaagcccatccgggagcaggccgagaacatcatccacctgttcaccctgaccaacctgggcgcccccgccgccttcaagtacttcgacaccaccatcgaccggaagcggtacacctccaccaaggaggtgctggacgccaccctgatccaccagtccatcaccggcctgtacgagacccggatcgacctgtcccagctgggcggcgacggcgcccccgagtccgccaccgagtccggcggcacctccaccgagtccgagggctccgccggcacctccaccgagtccgagggctccgccggctccgccggctccacctccaccgaggagggcacctccaccgagtccgagggctccgccggcacctccaccgagtccgagggctccgccggcacctccgagtccgccaccgagtccggcggcacctccaccgagtccgagggctcctcctccggtgccgccttcaagcccaaccccatcaactacatcctgggcctggacatcggcatcgcctccgtgggctgggccatggtggagatcgacgaggaggagaaccccatccggctgatcgacctgggcgtgcgggtgttcgagcgggccgaggtgcccaagaccggcgactccctggccatggcccggcggctggcccggtccgtgcggcggctgacccggcggcgggcccaccggctgctgcgggcccggcggctgctgaagcgggagggcgtgctgcaggccgccgacttcgacgagaacggcctgatcaagtccctgcccaacaccccctggcagctgcgggccgccgccctggaccggaagctgacccccctggagtggtccgccgtgctgctgcacctgatcaagcaccggggctacctgtcccagcggaagaacgagggcgagaccgccgacaaggagctgggcgccctgctgaagggcgtggccaacaacgcccacgccctgcagaccggcgacttccggacccccgccgagctggccctgaacaagttcgagaaggagtccggccacatccggaaccagcggggcgactactcccacaccttctcccggaaggacctgcaggccgagctgatcctgctgttcgagaagcagaaggagttcggcaacccccacgtgtccggcggcctgaaggagggcatcgagaccctgctgatgacccagcggcccgccctgtccggcgacgccgtgcagaagatgctgggccactgcaccttcgagcccgccgagcccaaggccgccaagaacacctacaccgccgagcggttcatctggctgaccaagctgaacaacctgcggatcctggagcagggctccgagcggcccctgaccgacaccgagcgggccaccctgatggacgagccctaccggaagtccaagctgacctacgcccaggcccggaagctgctgggcctggaggacaccgccttcttcaagggcctgcggtacggcaaggacaacgccgaggcctccaccctgatggagatgaaggcctaccacgccatctcccgggccctggagaaggagggcctgaaggacaagaagtcccccctgaacctgtcctccgagctgcaggacgagatcggcaccgccttctccctgttcaagaccgacgaggacatcaccggccggctgaaggaccgggtgcagcccgagatcctggaggccctgctgaagcacatctccttcgacaagttcgtgcagatctccctgaaggccctgcggcggatcgtgcccctgatggagcagggcaagcggtacgacgaggcctgcgccgagatctacggcgaccactacggcaagaagaacaccgaggagaagatctacctgccccccatccccgccgacgagatccggaaccccgtggtgctgcgggccctgtcccaggcccggaaggtgatcaacggcgtggtgcggcggtacggctcccccgcccggatccacatcgagaccgcccgggaggtgggcaagtccttcaaggaccggaaggagatcgagaagcggcaggaggagaaccggaaggaccgggagaaggccgccgccaagttccgggagtacttccccaacttcgtgggcgagcccaagtccaaggacatcctgaagctgcggctgtacgagcagcagcacggcaagtgcctgtactccggcaaggagatcaacctggtgcggctgaacgagaagggctacgtggagatcgaccacgccctgcccttctcccggacctgggacgactccttcaacaacaaggtgctggtgctgggctccgagaaccagaacaagggcaaccagaccccctacgagtacttcaacggcaaggacaactcccgggagtggcaggagttcaaggcccgggtggagacctcccggttcccccggtccaagaagcagcggatcctgctgcagaagttcgacgaggacggcttcaaggagtgcaacctgaacgacacccggtacgtgaaccgcttcctgtgccagttcgtggccgaccacatcctgctgaccggcaagggcaagcggcgggtgttcgcctccaacggccagatcaccaacctgctgcggggcttctggggcctgcggaaggtgcgggccgagaacgaccggcaccacgccctggacgccgtggtggtggcctgctccaccgtggccatgcagcagaagatcacccggttcgtgcggtacaaggagatgaacgccttcgacggcaagaccatcgacaaggagaccggcaaggtgctgcaccagaagacccacttcccccagccctgggagttcttcgcccaggaggtgatgatccgggtgttcggcaagcccgacggcaagcccgagttcgaggaggccgacacccccgagaagctgcggaccctgctggccgagaagctgtcctcccggcccgaggccgtgcacgagtacgtgacccccctgttcgtgtcccgggcccccaaccggaagatgtccggcgcccacaaggacaccctgcggtccgccaagcggttcgtgaagcacaacgagaagatctccgtgaagcgggtgtggctgaccgagatcaagctggccgacctggagaacatggtgaactacaagaacggccgggagatcgagctgtacgaggccctgaaggcccggctggaggcctacggcggcaacgccaagcaggccttcgaccccaaggacaaccccttctacaagaagggcggccagctggtgaaggccgtgcgggtggagaagacccaggagtccggcgtgctgctgaacaagaagaacgcctacaccatcgccgacaacggcgacatggtgcgggtggacgtgttctgcaaggtggacaagaagggcaagaaccagtacttcatcgtgcccatctacgcctggcaggtggccgagaacatcctgcccgacatcgactgcaagggctaccggatcgacgactcctacaccttctgcttctccctgcacaagtacgacctgatcgccttccagaaggacgagaagtccaaggtggagttcgcctactacatcaactgcgactcctccaacggccggttctacctggcctggcacgacaagggctccaaggagcagcagttccggatctccacccagaacctggtgctgatccagaagtaccaggtgaacgagctgggcaaggagatccggccctgccggctgaagaagcggccccccgtgcggtccggaaagcggaccgccgacggctccgagttcgagtcccccaagaagaagcggaaggtggagtag

SEQ ID NO: 47 - protein, 2552 aa, synthetic construct
  REGION 1..2552: note = Synthetic: R1333 WT Cas9-Cas9 fusion PA1-4 (mRNA N) - amino acid sequence (Example 4)
MDKKYSIGLDIGTNSVGWAVITDEYKVPSKKFKVLGNTDRHSIKKNLIGALLFDSGETAEATRLKRTARRRYTRRKNRICYLQEIFSNEMAKVDDSFFHRLEESFLVEEDKKHERHPIFGNIVDEVAYHEKYPTIYHLRKKLVDSTDKADLRLIYLALAHMIKFRGHFLIEGDLNPDNSDVDKLFIQLVQTYNQLFEENPINASGVDAKAILSARLSKSRRLENLIAQLPGEKKNGLFGNLIALSLGLTPNFKSNFDLAEDAKLQLSKDTYDDDLDNLLAQIGDQYADLFLAAKNLSDAILLSDILRVNTEITKAPLSASMIKRYDEHHQDLTLLKALVRQQLPEKYKEIFFDQSKNGYAGYIDGGASQEEFYKFIKPILEKMDGTEELLVKLNREDLLRKQRTFDNGSIPHQIHLGELHAILRRQEDFYPFLKDNREKIEKILTFRIPYYVGPLARGNSRFAWMTRKSEETITPWNFEEVVDKGASAQSFIERMTNFDKNLPNEKVLPKHSLLYEYFTVYNELTKVKYVTEGMRKPAFLSGEQKKAIVDLLFKTNRKVTVKQLKEDYFKKIECFDSVEISGVEDRFNASLGTYHDLLKIIKDKDFLDNEENEDILEDIVLTLTLFEDREMIEERLKTYAHLFDDKVMKQLKRRRYTGWGRLSRKLINGIRDKQSGKTILDFLKSDGFANRNFMQLIHDDSLTFKEDIQKAQVSGQGDSLHEHIANLAGSPAIKKGILQTVKVVDELVKVMGRHKPENIVIEMARENQTTQKGQKNSRERMKRIEEGIKELGSQILKEHPVENTQLQNEKLYLYYLQNGRDMYVDQELDINRLSDYDVDHIVPQSFLKDDSIDNKVLTRSDKNRGKSDNVPSEEVVKKMKNYWRQLLNAKLITQRKFDNLTKAERGGLSELDKAGFIKRQLVETRQITKHVAQILDSRMNTKYDENDKLIREVKVITLKSKLVSDFRKDFQFYKVREINNYHHAHDAYLNAVVGTALIKKYPKLESEFVYGDYKVYDVRKMIAKSEQEIGKATAKYFFYSNIMNFFKTEITLANGEIRKRPLIETNGETGEIVWDKGRDFATVRKVLSMPQVNIVKKTEVQTGGFSKESILPKRNSDKLIARKKDWDPKKYGGFDSPTVAYSVLVVAKVEKGKSKKLKSVKELLGITIMERSSFEKNPIDFLEAKGYKEVKKDLIIKLPKYSLFELENGRKRMLASAGELQKGNELALPSKYVNFLYLASHYEKLKGSPEDNEQKQLFVEQHKHYLDEIIEQISEFSKRVILADANLDKVLSAYNKHRDKPIREQAENIIHLFTLTNLGAPAAFKYFDTTIDRKRYTSTKEVLDATLIHQSITGLYETRIDLSQLGGDGAPESATESGGTSTESEGSAGTSTESEGSAGSAGSTSTEEGTSTESEGSAGTSTESEGSAGTSESATESGGTSTESEGSSSGAAFKPNPINYILGLDIGIASVGWAMVEIDEEENPIRLIDLGVRVFERAEVPKTGDSLAMARRLARSVRRLTRRRAHRLLRARRLLKREGVLQAADFDENGLIKSLPNTPWQLRAAALDRKLTPLEWSAVLLHLIKHRGYLSQRKNEGETADKELGALLKGVANNAHALQTGDFRTPAELALNKFEKESGHIRNQRGDYSHTFSRKDLQAELILLFEKQKEFGNPHVSGGLKEGIETLLMTQRPALSGDAVQKMLGHCTFEPAEPKAAKNTYTAERFIWLTKLNNLRILEQGSERPLTDTERATLMDEPYRKSKLTYAQARKLLGLEDTAFFKGLRYGKDNAEASTLMEMKAYHAISRALEKEGLKDKKSPLNLSSELQDEIGTAFSLFKTDEDITGRLKDRVQPEILEALLKHISFDKFVQISLKALRRIVPLMEQGKRYDEACAEIYGDHYGKKNTEEKIYLPPIPADEIRNPVVLRALSQARKVINGVVRRYGSPARIHIETAREVGKSFKDRKEIEKRQEENRKDREKAAAKFREYFPNFVGEPKSKDILKLRLYEQQHGKCLYSGKEINLVRLNEKGYVEIDHALPFSRTWDDSFNNKVLVLGSENQNKGNQTPYEYFNGKDNSREWQEFKARVETSRFPRSKKQRILLQKFDEDGFKECNLNDTRYVNRFLCQFVADHILLTGKGKRRVFASNGQITNLLRGFWGLRKVRAENDRHHALDAVVVACSTVAMQQKITRFVRYKEMNAFDGKTIDKETGKVLHQKTHFPQPWEFFAQEVMIRVFGKPDGKPEFEEADTPEKLRTLLAEKLSSRPEAVHEYVTPLFVSRAPNRKMSGAHKDTLRSAKRFVKHNEKISVKRVWLTEIKLADLENMVNYKNGREIELYEALKARLEAYGGNAKQAFDPKDNPFYKKGGQLVKAVRVEKTQESGVLLNKKNAYTIADNGDMVRVDVFCKVDKKGKNQYFIVPIYAWQVAENILPDIDCKGYRIDDSYTFCFSLHKYDLIAFQKDEKSKVEFAYYINCDSSNGRFYLAWHDKGSKEQQFRISTQNLVLIQKYQVNELGKEIRPCRLKKRPPVRSGKRTADGSEFESPKKKRKVE

SEQ ID NO: 48 - RNA, 8243 nt, synthetic construct
  misc_feature 1..8243: note = Synthetic: Cas9-Cas9 fusion -71 amino acid residue linker and HiBit tag (mRNA O)-mRNA sequence
  source 1..8243: mol_type = other RNA
gggaagctcagaataaacgctcaactttggccggatctgccaccatggacaagaagtactccatcggcctggacatcggcaccaactccgtgggctgggccgtgatcaccgacgagtacaaggtgccctccaagaagttcaaggtgctgggcaacaccgaccggcactccatcaagaagaacctgatcggcgccctgctgttcgactccggcgagaccgccgaggccacccggctgaagcggaccgcccggcggcggtacacccggcggaagaaccggatctgctacctgcaggagatcttctccaacgagatggccaaggtggacgactccttcttccaccggctggaggagtccttcctggtggaggaggacaagaagcacgagcggcaccccatcttcggcaacatcgtggacgaggtggcctaccacgagaagtaccccaccatctaccacctgcggaagaagctggtggactccaccgacaaggccgacctgcggctgatctacctggccctggcccacatgatcaagttccggggccacttcctgatcgagggcgacctgaaccccgacaactccgacgtggacaagctgttcatccagctggtgcagacctacaaccagctgttcgaggagaaccccatcaacgcctccggcgtggacgccaaggccatcctgtccgcccggctgtccaagtcccggcggctggagaacctgatcgcccagctgcccggcgagaagaagaacggcctgttcggcaacctgatcgccctgtccctgggcctgacccccaacttcaagtccaacttcgacctggccgaggacgccaagctgcagctgtccaaggacacctacgacgacgacctggacaacctgctggcccagatcggcgaccagtacgccgacctgttcctggccgccaagaacctgtccgacgccatcctgctgtccgacatcctgcgggtgaacaccgagatcaccaaggcccccctgtccgcctccatgatcaagcggtacgacgagcaccaccaggacctgaccctgctgaaggccctggtgcggcagcagctgcccgagaagtacaaggagatcttcttcgaccagtccaagaacggctacgccggctacatcgacggcggcgcctcccaggaggagttctacaagttcatcaagcccatcctggagaagatggacggcaccgaggagctgctggtgaagctgaaccgggaggacctgctgcggaagcagcggaccttcgacaacggctccatcccccaccagatccacctgggcgagctgcacgccatcctgcggcggcaggaggacttctaccccttcctgaaggacaaccgggagaagatcgagaagatcctgaccttccggatcccctactacgtgggccccctggcccggggcaactcccggttcgcctggatgacccggaagtccgaggagaccatcaccccctggaacttcgaggaggtggtggacaagggcgcctccgcccagtccttcatcgagcggatgaccaacttcgacaagaacctgcccaacgagaaggtgctgcccaagcactccctgctgtacgagtacttcaccgtgtacaacgagctgaccaaggtgaagtacgtgaccgagggcatgcggaagcccgccttcctgtccggcgagcagaagaaggccatcgtggacctgctgttcaagaccaaccggaaggtgaccgtgaagcagctgaaggaggactacttcaagaagatcgagtgcttcgactccgtggagatctccggcgtggaggaccggttcaacgcctccctgggcacctaccacgacctgctgaagatcatcaaggacaaggacttcctggacaacgaggagaacgaggacatcctggaggacatcgtgctgaccctgaccctgttcgaggaccgggagatgatcgaggagcggctgaagacctacgcccacctgttcgacgacaaggtgatgaagcagctgaagcggcggcggtacaccggctggggccggctgtcccggaagctgatcaacggcatccgggacaagcagtccggcaagaccatcctggacttcctgaagtccgacggcttcgccaaccggaacttcatgcagctgatccacgacgactccctgaccttcaaggaggacatccagaaggcccaggtgtccggccagggcgactccctgcacgagcacatcgccaacctggccggctcccccgccatcaagaagggcatcctgcagaccgtgaaggtggtggacgagctggtgaaggtgatgggccggcacaagcccgagaacatcgtgatcgagatggcccgggagaaccagaccacccagaagggccagaagaactcccgggagcggatgaagcggatcgaggagggcatcaaggagctgggctcccagatcctgaaggagcaccccgtggagaacacccagctgcagaacgagaagctgtacctgtactacctgcagaacggccgggacatgtacgtggaccaggagctggacatcaaccggctgtccgactacgacgtggaccacatcgtgccccagtccttcctgaaggacgactccatcgacaacaaggtgctgacccggtccgacaagaaccggggcaagtccgacaacgtgccctccgaggaggtggtgaagaagatgaagaactactggcggcagctgctgaacgccaagctgatcacccagcggaagttcgacaacctgaccaaggccgagcggggcggcctgtccgagctggacaaggccggcttcatcaagcggcagctggtggagacccggcagatcaccaagcacgtggcccagatcctggactcccggatgaacaccaagtacgacgagaacgacaagctgatccgggaggtgaaggtgatcaccctgaagtccaagctggtgtccgacttccggaaggacttccagttctacaaggtgcgggagatcaacaactaccaccacgcccacgacgcctacctgaacgccgtggtgggcaccgccctgatcaagaagtaccccaagctggagtccgagttcgtgtacggcgactacaaggtgtacgacgtgcggaagatgatcgccaagtccgagcaggagatcggcaaggccaccgccaagtacttcttctactccaacatcatgaacttcttcaagaccgagatcaccctggccaacggcgagatccggaagcggcccctgatcgagaccaacggcgagaccggcgagatcgtgtgggacaagggccgggacttcgccaccgtgcggaaggtgctgtccatgccccaggtgaacatcgtgaagaagaccgaggtgcagaccggcggcttctccaaggagtccatcctgcccaagcggaactccgacaagctgatcgcccggaagaaggactgggaccccaagaagtacggcggcttcgactcccccaccgtggcctactccgtgctggtggtggccaaggtggagaagggcaagtccaagaagctgaagtccgtgaaggagctgctgggcatcaccatcatggagcggtcctccttcgagaagaaccccatcgacttcctggaggccaagggctacaaggaggtgaagaaggacctgatcatcaagctgcccaagtactccctgttcgagctggagaacggccggaagcggatgctggcctccgccggcgagctgcagaagggcaacgagctggccctgccctccaagtacgtgaacttcctgtacctggcctcccactacgagaagctgaagggctcccccgaggacaacgagcagaagcagctgttcgtggagcagcacaagcactacctggacgagatcatcgagcagatctccgagttctccaagcgggtgatcctggccgacgccaacctggacaaggtgctgtccgcctacaacaagcaccgggacaagcccatccgggagcaggccgagaacatcatccacctgttcaccctgaccaacctgggcgcccccgccgccttcaagtacttcgacaccaccatcgacaagaagcggtacacctccaccaaggaggtgctggacgccaccctgatccaccagtccatcaccggcctgtacgagacccggatcgacctgtcccagctgggcggcgacggcgcccccgagtccgccaccgagtccggcggcacctccaccgagtccgagggctccgccggcacctccaccgagtccgagggctccgccggctccgccggctccacctccaccgaggagggcacctccaccgagtccgagggctccgccggcacctccaccgagtccgagggctccgccggcacctccgagtccgccaccggctcctcctccggtgccgccttcaagcccaaccccatcaactacatcctgggcctggacatcggcatcgcctccgtgggctgggccatggtggagatcgacgaggaggagaaccccatccggctgatcgacctgggcgtgcgggtgttcgagcgggccgaggtgcccaagaccggcgactccctggccatggcccggcggctggcccggtccgtgcggcggctgacccggcggcgggcccaccggctgctgcgggcccggcggctgctgaagcgggagggcgtgctgcaggccgccgacttcgacgagaacggcctgatcaagtccctgcccaacaccccctggcagctgcgggccgccgccctggaccggaagctgacccccctggagtggtccgccgtgctgctgcacctgatcaagcaccggggctacctgtcccagcggaagaacgagggcgagaccgccgacaaggagctgggcgccctgctgaagggcgtggccaacaacgcccacgccctgcagaccggcgacttccggacccccgccgagctggccctgaacaagttcgagaaggagtccggccacatccggaaccagcggggcgactactcccacaccttctcccggaaggacctgcaggccgagctgatcctgctgttcgagaagcagaaggagttcggcaacccccacgtgtccggcggcctgaaggagggcatcgagaccctgctgatgacccagcggcccgccctgtccggcgacgccgtgcagaagatgctgggccactgcaccttcgagcccgccgagcccaaggccgccaagaacacctacaccgccgagcggttcatctggctgaccaagctgaacaacctgcggatcctggagcagggctccgagcggcccctgaccgacaccgagcgggccaccctgatggacgagccctaccggaagtccaagctgacctacgcccaggcccggaagctgctgggcctggaggacaccgccttcttcaagggcctgcggtacggcaaggacaacgccgaggcctccaccctgatggagatgaaggcctaccacgccatctcccgggccctggagaaggagggcctgaaggacaagaagtcccccctgaacctgtcctccgagctgcaggacgagatcggcaccgccttctccctgttcaagaccgacgaggacatcaccggccggctgaaggaccgggtgcagcccgagatcctggaggccctgctgaagcacatctccttcgacaagttcgtgcagatctccctgaaggccctgcggcggatcgtgcccctgatggagcagggcaagcggtacgacgaggcctgcgccgagatctacggcgaccactacggcaagaagaacaccgaggagaagatctacctgccccccatccccgccgacgagatccggaaccccgtggtgctgcgggccctgtcccaggcccggaaggtgatcaacggcgtggtgcggcggtacggctcccccgcccggatccacatcgagaccgcccgggaggtgggcaagtccttcaaggaccggaaggagatcgagaagcggcaggaggagaaccggaaggaccgggagaaggccgccgccaagttccgggagtacttccccaacttcgtgggcgagcccaagtccaaggacatcctgaagctgcggctgtacgagcagcagcacggcaagtgcctgtactccggcaaggagatcaacctggtgcggctgaacgagaagggctacgtggagatcgaccacgccctgcccttctcccggacctgggacgactccttcaacaacaaggtgctggtgctgggctccgagaaccagaacaagggcaaccagaccccctacgagtacttcaacggcaaggacaactcccgggagtggcaggagttcaaggcccgggtggagacctcccggttcccccggtccaagaagcagcggatcctgctgcagaagttcgacgaggacggcttcaaggagtgcaacctgaacgacacccggtacgtgaaccgcttcctgtgccagttcgtggccgaccacatcctgctgaccggcaagggcaagcggcgggtgttcgcctccaacggccagatcaccaacctgctgcggggcttctggggcctgcggaaggtgcgggccgagaacgaccggcaccacgccctggacgccgtggtggtggcctgctccaccgtggccatgcagcagaagatcacccggttcgtgcggtacaaggagatgaacgccttcgacggcaagaccatcgacaaggagaccggcaaggtgctgcaccagaagacccacttcccccagccctgggagttcttcgcccaggaggtgatgatccgggtgttcggcaagcccgacggcaagcccgagttcgaggaggccgacacccccgagaagctgcggaccctgctggccgagaagctgtcctcccggcccgaggccgtgcacgagtacgtgacccccctgttcgtgtcccgggcccccaaccggaagatgtccggcgcccacaaggacaccctgcggtccgccaagcggttcgtgaagcacaacgagaagatctccgtgaagcgggtgtggctgaccgagatcaagctggccgacctggagaacatggtgaactacaagaacggccgggagatcgagctgtacgaggccctgaaggcccggctggaggcctacggcggcaacgccaagcaggccttcgaccccaaggacaaccccttctacaagaagggcggccagctggtgaaggccgtgcgggtggagaagacccaggagtccggcgtgctgctgaacaagaagaacgcctacaccatcgccgacaacggcgacatggtgcgggtggacgtgttctgcaaggtggacaagaagggcaagaaccagtacttcatcgtgcccatctacgcctggcaggtggccgagaacatcctgcccgacatcgactgcaagggctaccggatcgacgactcctacaccttctgcttctccctgcacaagtacgacctgatcgccttccagaaggacgagaagtccaaggtggagttcgcctactacatcaactgcgactcctccaacggccggttctacctggcctggcacgacaagggctccaaggagcagcagttccggatctccacccagaacctggtgctgatccagaagtaccaggtgaacgagctgggcaaggagatccggccctgccggctgaagaagcggccccccgtgcggtccggaaagcggaccgccgacggctccggaggaggaagcccgaagaagaagagaaaggtcagcgaaagcgcaacaccggaaagcgtcagcggatggagactgttcaagaagatcagctagctagcaccagcctcaagaacacccgaatggagtctctaagctacataataccaacttacactttacaaaatgttgtcccccaaaatgtagccattcgtatctgctcctaataaaaagaaagtttcttcacattctctcgagaaaaaaaaaaaatggaaaaaaaaaaaacggaaaaaaaaaaaaggtaaaaaaaaaaaatataaaaaaaaaaaacataaaaaaaaaaaacgaaaaaaaaaaaacgtaaaaaaaaaaaactcaaaaaaaaaaaagataaaaaaaaaaaacctaaaaaaaaaaaatgtaaaaaaaaaaaagggaaaaaaaaaaaacgcaaaaaaaaaaaacacaaaaaaaaaaaatgcaaaaaaaaaaaatcgaaaaaaaaaaaatctaaaaaaaaaaaacgaaaaaaaaaaaacccaaaaaaaaaaaagacaaaaaaaaaaaatagaaaaaaaaaaaagttaaaaaaaaaaaactgaaaaaaaaaaaatttaaaaaaaaaaaatctag

SEQ ID NO: 49 - RNA, 7683 nt, synthetic construct
  misc_feature 1..7683: note = Synthetic: Cas9-Cas9 fusion -71 amino acid residue linker and HiBit tag (mRNA O)-ORF sequence
  source 1..7683: mol_type = other RNA
atggacaagaagtactccatcggcctggacatcggcaccaactccgtgggctgggccgtgatcaccgacgagtacaaggtgccctccaagaagttcaaggtgctgggcaacaccgaccggcactccatcaagaagaacctgatcggcgccctgctgttcgactccggcgagaccgccgaggccacccggctgaagcggaccgcccggcggcggtacacccggcggaagaaccggatctgctacctgcaggagatcttctccaacgagatggccaaggtggacgactccttcttccaccggctggaggagtccttcctggtggaggaggacaagaagcacgagcggcaccccatcttcggcaacatcgtggacgaggtggcctaccacgagaagtaccccaccatctaccacctgcggaagaagctggtggactccaccgacaaggccgacctgcggctgatctacctggccctggcccacatgatcaagttccggggccacttcctgatcgagggcgacctgaaccccgacaactccgacgtggacaagctgttcatccagctggtgcagacctacaaccagctgttcgaggagaaccccatcaacgcctccggcgtggacgccaaggccatcctgtccgcccggctgtccaagtcccggcggctggagaacctgatcgcccagctgcccggcgagaagaagaacggcctgttcggcaacctgatcgccctgtccctgggcctgacccccaacttcaagtccaacttcgacctggccgaggacgccaagctgcagctgtccaaggacacctacgacgacgacctggacaacctgctggcccagatcggcgaccagtacgccgacctgttcctggccgccaagaacctgtccgacgccatcctgctgtccgacatcctgcgggtgaacaccgagatcaccaaggcccccctgtccgcctccatgatcaagcggtacgacgagcaccaccaggacctgaccctgctgaaggccctggtgcggcagcagctgcccgagaagtacaaggagatcttcttcgaccagtccaagaacggctacgccggctacatcgacggcggcgcctcccaggaggagttctacaagttcatcaagcccatcctggagaagatggacggcaccgaggagctgctggtgaagctgaaccgggaggacctgctgcggaagcagcggaccttcgacaacggctccatcccccaccagatccacctgggcgagctgcacgccatcctgcggcggcaggaggacttctaccccttcctgaaggacaaccgggagaagatcgagaagatcctgaccttccggatcccctactacgtgggccccctggcccggggcaactcccggttcgcctggatgacccggaagtccgaggagaccatcaccccctggaacttcgaggaggtggtggacaagggcgcctccgcccagtccttcatcgagcggatgaccaacttcgacaagaacctgcccaacgagaaggtgctgcccaagcactccctgctgtacgagtacttcaccgtgtacaacgagctgaccaaggtgaagtacgtgaccgagggcatgcggaagcccgccttcctgtccggcgagcagaagaaggccatcgtggacctgctgttcaagaccaaccggaaggtgaccgtgaagcagctgaaggaggactacttcaagaagatcgagtgcttcgactccgtggagatctccggcgtggaggaccggttcaacgcctccctgggcacctaccacgacctgctgaagatcatcaaggacaaggacttcctggacaacgaggagaacgaggacatcctggaggacatcgtgctgaccctgaccctgttcgaggaccgggagatgatcgaggagcggctgaagacctacgcccacctgttcgacgacaaggtgatgaagcagctgaagcggcggcggtacaccggctggggccggctgtcccggaagctgatcaacggcatccgggacaagcagtccggcaagaccatcctggacttcctgaagtccgacggcttcgccaaccggaacttcatgcagctgatccacgacgactccctgaccttcaaggaggacatccagaaggcccaggtgtccggccagggcgactccctgcacgagcacatcgccaacctggccggctcccccgccatcaagaagggcatcctgcagaccgtgaaggtggtggacgagctggtgaaggtgatgggccggcacaagcccgagaacatcgtgatcgagatggcccgggagaaccagaccacccagaagggccagaagaactcccgggagcggatgaagcggatcgaggagggcatcaaggagctgggctcccagatcctgaaggagcaccccgtggagaacacccagctgcagaacgagaagctgtacctgtactacctgcagaacggccgggacatgtacgtggaccaggagctggacatcaaccggctgtccgactacgacgtggaccacatcgtgccccagtccttcctgaaggacgactccatcgacaacaaggtgctgacccggtccgacaagaaccggggcaagtccgacaacgtgccctccgaggaggtggtgaagaagatgaagaactactggcggcagctgctgaacgccaagctgatcacccagcggaagttcgacaacctgaccaaggccgagcggggcggcctgtccgagctggacaaggccggcttcatcaagcggcagctggtggagacccggcagatcaccaagcacgtggcccagatcctggactcccggatgaacaccaagtacgacgagaacgacaagctgatccgggaggtgaaggtgatcaccctgaagtccaagctggtgtccgacttccggaaggacttccagttctacaaggtgcgggagatcaacaactaccaccacgcccacgacgcctacctgaacgccgtggtgggcaccgccctgatcaagaagtaccccaagctggagtccgagttcgtgtacggcgactacaaggtgtacgacgtgcggaagatgatcgccaagtccgagcaggagatcggcaaggccaccgccaagtacttcttctactccaacatcatgaacttcttcaagaccgagatcaccctggccaacggcgagatccggaagcggcccctgatcgagaccaacggcgagaccggcgagatcgtgtgggacaagggccgggacttcgccaccgtgcggaaggtgctgtccatgccccaggtgaacatcgtgaagaagaccgaggtgcagaccggcggcttctccaaggagtccatcctgcccaagcggaactccgacaagctgatcgcccggaagaaggactgggaccccaagaagtacggcggcttcgactcccccaccgtggcctactccgtgctggtggtggccaaggtggagaagggcaagtccaagaagctgaagtccgtgaaggagctgctgggcatcaccatcatggagcggtcctccttcgagaagaaccccatcgacttcctggaggccaagggctacaaggaggtgaagaaggacctgatcatcaagctgcccaagtactccctgttcgagctggagaacggccggaagcggatgctggcctccgccggcgagctgcagaagggcaacgagctggccctgccctccaagtacgtgaacttcctgtacctggcctcccactacgagaagctgaagggctcccccgaggacaacgagcagaagcagctgttcgtggagcagcacaagcactacctggacgagatcatcgagcagatctccgagttctccaagcgggtgatcctggccgacgccaacctggacaaggtgctgtccgcctacaacaagcaccgggacaagcccatccgggagcaggccgagaacatcatccacctgttcaccctgaccaacctgggcgcccccgccgccttcaagtacttcgacaccaccatcgacaagaagcggtacacctccaccaaggaggtgctggacgccaccctgatccaccagtccatcaccggcctgtacgagacccggatcgacctgtcccagctgggcggcgacggcgcccccgagtccgccaccgagtccggcggcacctccaccgagtccgagggctccgccggcacctccaccgagtccgagggctccgccggctccgccggctccacctccaccgaggagggcacctccaccgagtccgagggctccgccggcacctccaccgagtccgagggctccgccggcacctccgagtccgccaccggctcctcctccggtgccgccttcaagcccaaccccatcaactacatcctgggcctggacatcggcatcgcctccgtgggctgggccatggtggagatcgacgaggaggagaaccccatccggctgatcgacctgggcgtgcgggtgttcgagcgggccgaggtgcccaagaccggcgactccctggccatggcccggcggctggcccggtccgtgcggcggctgacccggcggcgggcccaccggctgctgcgggcccggcggctgctgaagcgggagggcgtgctgcaggccgccgacttcgacgagaacggcctgatcaagtccctgcccaacaccccctggcagctgcgggccgccgccctggaccggaagctgacccccctggagtggtccgccgtgctgctgcacctgatcaagcaccggggctacctgtcccagcggaagaacgagggcgagaccgccgacaaggagctgggcgccctgctgaagggcgtggccaacaacgcccacgccctgcagaccggcgacttccggacccccgccgagctggccctgaacaagttcgagaaggagtccggccacatccggaaccagcggggcgactactcccacaccttctcccggaaggacctgcaggccgagctgatcctgctgttcgagaagcagaaggagttcggcaacccccacgtgtccggcggcctgaaggagggcatcgagaccctgctgatgacccagcggcccgccctgtccggcgacgccgtgcagaagatgctgggccactgcaccttcgagcccgccgagcccaaggccgccaagaacacctacaccgccgagcggttcatctggctgaccaagctgaacaacctgcggatcctggagcagggctccgagcggcccctgaccgacaccgagcgggccaccctgatggacgagccctaccggaagtccaagctgacctacgcccaggcccggaagctgctgggcctggaggacaccgccttcttcaagggcctgcggtacggcaaggacaacgccgaggcctccaccctgatggagatgaaggcctaccacgccatctcccgggccctggagaaggagggcctgaaggacaagaagtcccccctgaacctgtcctccgagctgcaggacgagatcggcaccgccttctccctgttcaagaccgacgaggacatcaccggccggctgaaggaccgggtgcagcccgagatcctggaggccctgctgaagcacatctccttcgacaagttcgtgcagatctccctgaaggccctgcggcggatcgtgcccctgatggagcagggcaagcggtacgacgaggcctgcgccgagatctacggcgaccactacggcaagaagaacaccgaggagaagatctacctgccccccatccccgccgacgagatccggaaccccgtggtgctgcgggccctgtcccaggcccggaaggtgatcaacggcgtggtgcggcggtacggctcccccgcccggatccacatcgagaccgcccgggaggtgggcaagtccttcaaggaccggaaggagatcgagaagcggcaggaggagaaccggaaggaccgggagaaggccgccgccaagttccgggagtacttccccaacttcgtgggcgagcccaagtccaaggacatcctgaagctgcggctgtacgagcagcagcacggcaagtgcctgtactccggcaaggagatcaacctggtgcggctgaacgagaagggctacgtggagatcgaccacgccctgcccttctcccggacctgggacgactccttcaacaacaaggtgctggtgctgggctccgagaaccagaacaagggcaaccagaccccctacgagtacttcaacggcaaggacaactcccgggagtggcaggagttcaaggcccgggtggagacctcccggttcccccggtccaagaagcagcggatcctgctgcagaagttcgacgaggacggcttcaaggagtgcaacctgaacgacacccggtacgtgaaccgcttcctgtgccagttcgtggccgaccacatcctgctgaccggcaagggcaagcggcgggtgttcgcctccaacggccagatcaccaacctgctgcggggcttctggggcctgcggaaggtgcgggccgagaacgaccggcaccacgccctggacgccgtggtggtggcctgctccaccgtggccatgcagcagaagatcacccggttcgtgcggtacaaggagatgaacgccttcgacggcaagaccatcgacaaggagaccggcaaggtgctgcaccagaagacccacttcccccagccctgggagttcttcgcccaggaggtgatgatccgggtgttcggcaagcccgacggcaagcccgagttcgaggaggccgacacccccgagaagctgcggaccctgctggccgagaagctgtcctcccggcccgaggccgtgcacgagtacgtgacccccctgttcgtgtcccgggcccccaaccggaagatgtccggcgcccacaaggacaccctgcggtccgccaagcggttcgtgaagcacaacgagaagatctccgtgaagcgggtgtggctgaccgagatcaagctggccgacctggagaacatggtgaactacaagaacggccgggagatcgagctgtacgaggccctgaaggcccggctggaggcctacggcggcaacgccaagcaggccttcgaccccaaggacaaccccttctacaagaagggcggccagctggtgaaggccgtgcgggtggagaagacccaggagtccggcgtgctgctgaacaagaagaacgcctacaccatcgccgacaacggcgacatggtgcgggtggacgtgttctgcaaggtggacaagaagggcaagaaccagtacttcatcgtgcccatctacgcctggcaggtggccgagaacatcctgcccgacatcgactgcaagggctaccggatcgacgactcctacaccttctgcttctccctgcacaagtacgacctgatcgccttccagaaggacgagaagtccaaggtggagttcgcctactacatcaactgcgactcctccaacggccggttctacctggcctggcacgacaagggctccaaggagcagcagttccggatctccacccagaacctggtgctgatccagaagtaccaggtgaacgagctgggcaaggagatccggccctgccggctgaagaagcggccccccgtgcggtccggaaagcggaccgccgacggctccggaggaggaagcccgaagaagaagagaaaggtcagcgaaagcgcaacaccggaaagcgtcagcggatggagactgttcaagaagatcagctag

SEQ ID NO: 50 - protein, 2560 aa, synthetic construct
  REGION 1..2560: note = Synthetic: Cas9-Cas9 fusion -71 amino acid residue linker and HiBit tag (mRNA O)-amino acid sequence
MDKKYSIGLDIGTNSVGWAVITDEYKVPSKKFKVLGNTDRHSIKKNLIGALLFDSGETAEATRLKRTARRRYTRRKNRICYLQEIFSNEMAKVDDSFFHRLEESFLVEEDKKHERHPIFGNIVDEVAYHEKYPTIYHLRKKLVDSTDKADLRLIYLALAHMIKFRGHFLIEGDLNPDNSDVDKLFIQLVQTYNQLFEENPINASGVDAKAILSARLSKSRRLENLIAQLPGEKKNGLFGNLIALSLGLTPNFKSNFDLAEDAKLQLSKDTYDDDLDNLLAQIGDQYADLFLAAKNLSDAILLSDILRVNTEITKAPLSASMIKRYDEHHQDLTLLKALVRQQLPEKYKEIFFDQSKNGYAGYIDGGASQEEFYKFIKPILEKMDGTEELLVKLNREDLLRKQRTFDNGSIPHQIHLGELHAILRRQEDFYPFLKDNREKIEKILTFRIPYYVGPLARGNSRFAWMTRKSEETITPWNFEEVVDKGASAQSFIERMTNFDKNLPNEKVLPKHSLLYEYFTVYNELTKVKYVTEGMRKPAFLSGEQKKAIVDLLFKTNRKVTVKQLKEDYFKKIECFDSVEISGVEDRFNASLGTYHDLLKIIKDKDFLDNEENEDILEDIVLTLTLFEDREMIEERLKTYAHLFDDKVMKQLKRRRYTGWGRLSRKLINGIRDKQSGKTILDFLKSDGFANRNFMQLIHDDSLTFKEDIQKAQVSGQGDSLHEHIANLAGSPAIKKGILQTVKVVDELVKVMGRHKPENIVIEMARENQTTQKGQKNSRERMKRIEEGIKELGSQILKEHPVENTQLQNEKLYLYYLQNGRDMYVDQELDINRLSDYDVDHIVPQSFLKDDSIDNKVLTRSDKNRGKSDNVPSEEVVKKMKNYWRQLLNAKLITQRKFDNLTKAERGGLSELDKAGFIKRQLVETRQITKHVAQILDSRMNTKYDENDKLIREVKVITLKSKLVSDFRKDFQFYKVREINNYHHAHDAYLNAVVGTALIKKYPKLESEFVYGDYKVYDVRKMIAKSEQEIGKATAKYFFYSNIMNFFKTEITLANGEIRKRPLIETNGETGEIVWDKGRDFATVRKVLSMPQVNIVKKTEVQTGGFSKESILPKRNSDKLIARKKDWDPKKYGGFDSPTVAYSVLVVAKVEKGKSKKLKSVKELLGITIMERSSFEKNPIDFLEAKGYKEVKKDLIIKLPKYSLFELENGRKRMLASAGELQKGNELALPSKYVNFLYLASHYEKLKGSPEDNEQKQLFVEQHKHYLDEIIEQISEFSKRVILADANLDKVLSAYNKHRDKPIREQAENIIHLFTLTNLGAPAAFKYFDTTIDKKRYTSTKEVLDATLIHQSITGLYETRIDLSQLGGDGAPESATESGGTSTESEGSAGTSTESEGSAGSAGSTSTEEGTSTESEGSAGTSTESEGSAGTSESATGSSSGAAFKPNPINYILGLDIGIASVGWAMVEIDEEENPIRLIDLGVRVFERAEVPKTGDSLAMARRLARSVRRLTRRRAHRLLRARRLLKREGVLQAADFDENGLIKSLPNTPWQLRAAALDRKLTPLEWSAVLLHLIKHRGYLSQRKNEGETADKELGALLKGVANNAHALQTGDFRTPAELALNKFEKESGHIRNQRGDYSHTFSRKDLQAELILLFEKQKEFGNPHVSGGLKEGIETLLMTQRPALSGDAVQKMLGHCTFEPAEPKAAKNTYTAERFIWLTKLNNLRILEQGSERPLTDTERATLMDEPYRKSKLTYAQARKLLGLEDTAFFKGLRYGKDNAEASTLMEMKAYHAISRALEKEGLKDKKSPLNLSSELQDEIGTAFSLFKTDEDITGRLKDRVQPEILEALLKHISFDKFVQISLKALRRIVPLMEQGKRYDEACAEIYGDHYGKKNTEEKIYLPPIPADEIRNPVVLRALSQARKVINGVVRRYGSPARIHIETAREVGKSFKDRKEIEKRQEENRKDREKAAAKFREYFPNFVGEPKSKDILKLRLYEQQHGKCLYSGKEINLVRLNEKGYVEIDHALPFSRTWDDSFNNKVLVLGSENQNKGNQTPYEYFNGKDNSREWQEFKARVETSRFPRSKKQRILLQKFDEDGFKECNLNDTRYVNRFLCQFVADHILLTGKGKRRVFASNGQITNLLRGFWGLRKVRAENDRHHALDAVVVACSTVAMQQKITRFVRYKEMNAFDGKTIDKETGKVLHQKTHFPQPWEFFAQEVMIRVFGKPDGKPEFEEADTPEKLRTLLAEKLSSRPEAVHEYVTPLFVSRAPNRKMSGAHKDTLRSAKRFVKHNEKISVKRVWLTEIKLADLENMVNYKNGREIELYEALKARLEAYGGNAKQAFDPKDNPFYKKGGQLVKAVRVEKTQESGVLLNKKNAYTIADNGDMVRVDVFCKVDKKGKNQYFIVPIYAWQVAENILPDIDCKGYRIDDSYTFCFSLHKYDLIAFQKDEKSKVEFAYYINCDSSNGRFYLAWHDKGSKEQQFRISTQNLVLIQKYQVNELGKEIRPCRLKKRPPVRSGKRTADGSGGGSPKKKRKVSESATPESVSGWRLFKKIS

SEQ ID NO: 51 - RNA, 7626 nt, synthetic construct
  misc_feature 1..7626: note = Synthetic: Cas9-Cas9 fusion -71 amino acid residual linker (mRNA O)-mRNA sequence
  source 1..7626: mol_type = other RNA
atggacaagaagtactccatcggcctggacatcggcaccaactccgtgggctgggccgtgatcaccgacgagtacaaggtgccctccaagaagttcaaggtgctgggcaacaccgaccggcactccatcaagaagaacctgatcggcgccctgctgttcgactccggcgagaccgccgaggccacccggctgaagcggaccgcccggcggcggtacacccggcggaagaaccggatctgctacctgcaggagatcttctccaacgagatggccaaggtggacgactccttcttccaccggctggaggagtccttcctggtggaggaggacaagaagcacgagcggcaccccatcttcggcaacatcgtggacgaggtggcctaccacgagaagtaccccaccatctaccacctgcggaagaagctggtggactccaccgacaaggccgacctgcggctgatctacctggccctggcccacatgatcaagttccggggccacttcctgatcgagggcgacctgaaccccgacaactccgacgtggacaagctgttcatccagctggtgcagacctacaaccagctgttcgaggagaaccccatcaacgcctccggcgtggacgccaaggccatcctgtccgcccggctgtccaagtcccggcggctggagaacctgatcgcccagctgcccggcgagaagaagaacggcctgttcggcaacctgatcgccctgtccctgggcctgacccccaacttcaagtccaacttcgacctggccgaggacgccaagctgcagctgtccaaggacacctacgacgacgacctggacaacctgctggcccagatcggcgaccagtacgccgacctgttcctggccgccaagaacctgtccgacgccatcctgctgtccgacatcctgcgggtgaacaccgagatcaccaaggcccccctgtccgcctccatgatcaagcggtacgacgagcaccaccaggacctgaccctgctgaaggccctggtgcggcagcagctgcccgagaagtacaaggagatcttcttcgaccagtccaagaacggctacgccggctacatcgacggcggcgcctcccaggaggagttctacaagttcatcaagcccatcctggagaagatggacggcaccgaggagctgctggtgaagctgaaccgggaggacctgctgcggaagcagcggaccttcgacaacggctccatcccccaccagatccacctgggcgagctgcacgccatcctgcggcggcaggaggacttctaccccttcctgaaggacaaccgggagaagatcgagaagatcctgaccttccggatcccctactacgtgggccccctggcccggggcaactcccggttcgcctggatgacccggaagtccgaggagaccatcaccccctggaacttcgaggaggtggtggacaagggcgcctccgcccagtccttcatcgagcggatgaccaacttcgacaagaacctgcccaacgagaaggtgctgcccaagcactccctgctgtacgagtacttcaccgtgtacaacgagctgaccaaggtgaagtacgtgaccgagggcatgcggaagcccgccttcctgtccggcgagcagaagaaggccatcgtggacctgctgttcaagaccaaccggaaggtgaccgtgaagcagctgaaggaggactacttcaagaagatcgagtgcttcgactccgtggagatctccggcgtggaggaccggttcaacgcctccctgggcacctaccacgacctgctgaagatcatcaaggacaaggacttcctggacaacgaggagaacgaggacatcctggaggacatcgtgctgaccctgaccctgttcgaggaccgggagatgatcgaggagcggctgaagacctacgcccacctgttcgacgacaaggtgatgaagcagctgaagcggcggcggtacaccggctggggccggctgtcccggaagctgatcaacggcatccgggacaagcagtccggcaagaccatcctggacttcctgaagtccgacggcttcgccaaccggaacttcatgcagctgatccacgacgactccctgaccttcaaggaggacatccagaaggcccaggtgtccggccagggcgactccctgcacgagcacatcgccaacctggccggctcccccgccatcaagaagggcatcctgcagaccgtgaaggtggtggacgagctggtgaaggtgatgggccggcacaagcccgagaacatcgtgatcgagatggcccgggagaaccagaccacccagaagggccagaagaactcccgggagcggatgaagcggatcgaggagggcatcaaggagctgggctcccagatcctgaaggagcaccccgtggagaacacccagctgcagaacgagaagctgtacctgtactacctgcagaacggccgggacatgtacgtggaccaggagctggacatcaaccggctgtccgactacgacgtggaccacatcgtgccccagtccttcctgaaggacgactccatcgacaacaaggtgctgacccggtccgacaagaaccggggcaagtccgacaacgtgccctccgaggaggtggtgaagaagatgaagaactactggcggcagctgctgaacgccaagctgatcacccagcggaagttcgacaacctgaccaaggccgagcggggcggcctgtccgagctggacaaggccggcttcatcaagcggcagctggtggagacccggcagatcaccaagcacgtggcccagatcctggactcccggatgaacaccaagtacgacgagaacgacaagctgatccgggaggtgaaggtgatcaccctgaagtccaagctggtgtccgacttccggaaggacttccagttctacaaggtgcgggagatcaacaactaccaccacgcccacgacgcctacctgaacgccgtggtgggcaccgccctgatcaagaagtaccccaagctggagtccgagttcgtgtacggcgactacaaggtgtacgacgtgcggaagatgatcgccaagtccgagcaggagatcggcaaggccaccgccaagtacttcttctactccaacatcatgaacttcttcaagaccgagatcaccctggccaacggcgagatccggaagcggcccctgatcgagaccaacggcgagaccggcgagatcgtgtgggacaagggccgggacttcgccaccgtgcggaaggtgctgtccatgccccaggtgaacatcgtgaagaagaccgaggtgcagaccggcggcttctccaaggagtccatcctgcccaagcggaactccgacaagctgatcgcccggaagaaggactgggaccccaagaagtacggcggcttcgactcccccaccgtggcctactccgtgctggtggtggccaaggtggagaagggcaagtccaagaagctgaagtccgtgaaggagctgctgggcatcaccatcatggagcggtcctccttcgagaagaaccccatcgacttcctggaggccaagggctacaaggaggtgaagaaggacctgatcatcaagctgcccaagtactccctgttcgagctggagaacggccggaagcggatgctggcctccgccggcgagctgcagaagggcaacgagctggccctgccctccaagtacgtgaacttcctgtacctggcctcccactacgagaagctgaagggctcccccgaggacaacgagcagaagcagctgttcgtggagcagcacaagcactacctggacgagatcatcgagcagatctccgagttctccaagcgggtgatcctggccgacgccaacctggacaaggtgctgtccgcctacaacaagcaccgggacaagcccatccgggagcaggccgagaacatcatccacctgttcaccctgaccaacctgggcgcccccgccgccttcaagtacttcgacaccaccatcgacaagaagcggtacacctccaccaaggaggtgctggacgccaccctgatccaccagtccatcaccggcctgtacgagacccggatcgacctgtcccagctgggcggcgacggcgcccccgagtccgccaccgagtccggcggcacctccaccgagtccgagggctccgccggcacctccaccgagtccgagggctccgccggctccgccggctccacctccaccgaggagggcacctccaccgagtccgagggctccgccggcacctccaccgagtccgagggctccgccggcacctccgagtccgccaccggctcctcctccggtgccgccttcaagcccaaccccatcaactacatcctgggcctggacatcggcatcgcctccgtgggctgggccatggtggagatcgacgaggaggagaaccccatccggctgatcgacctgggcgtgcgggtgttcgagcgggccgaggtgcccaagaccggcgactccctggccatggcccggcggctggcccggtccgtgcggcggctgacccggcggcgggcccaccggctgctgcgggcccggcggctgctgaagcgggagggcgtgctgcaggccgccgacttcgacgagaacggcctgatcaagtccctgcccaacaccccctggcagctgcgggccgccgccctggaccggaagctgacccccctggagtggtccgccgtgctgctgcacctgatcaagcaccggggctacctgtcccagcggaagaacgagggcgagaccgccgacaaggagctgggcgccctgctgaagggcgtggccaacaacgcccacgccctgcagaccggcgacttccggacccccgccgagctggccctgaacaagttcgagaaggagtccggccacatccggaaccagcggggcgactactcccacaccttctcccggaaggacctgcaggccgagctgatcctgctgttcgagaagcagaaggagttcggcaacccccacgtgtccggcggcctgaaggagggcatcgagaccctgctgatgacccagcggcccgccctgtccggcgacgccgtgcagaagatgctgggccactgcaccttcgagcccgccgagcccaaggccgccaagaacacctacaccgccgagcggttcatctggctgaccaagctgaacaacctgcggatcctggagcagggctccgagcggcccctgaccgacaccgagcgggccaccctgatggacgagccctaccggaagtccaagctgacctacgcccaggcccggaagctgctgggcctggaggacaccgccttcttcaagggcctgcggtacggcaaggacaacgccgaggcctccaccctgatggagatgaaggcctaccacgccatctcccgggccctggagaaggagggcctgaaggacaagaagtcccccctgaacctgtcctccgagctgcaggacgagatcggcaccgccttctccctgttcaagaccgacgaggacatcaccggccggctgaaggaccgggtgcagcccgagatcctggaggccctgctgaagcacatctccttcgacaagttcgtgcagatctccctgaaggccctgcggcggatcgtgcccctgatggagcagggcaagcggtacgacgaggcctgcgccgagatctacggcgaccactacggcaagaagaacaccgaggagaagatctacctgccccccatccccgccgacgagatccggaaccccgtggtgctgcgggccctgtcccaggcccggaaggtgatcaacggcgtggtgcggcggtacggctcccccgcccggatccacatcgagaccgcccgggaggtgggcaagtccttcaaggaccggaaggagatcgagaagcggcaggaggagaaccggaaggaccgggagaaggccgccgccaagttccgggagtacttccccaacttcgtgggcgagcccaagtccaaggacatcctgaagctgcggctgtacgagcagcagcacggcaagtgcctgtactccggcaaggagatcaacctggtgcggctgaacgagaagggctacgtggagatcgaccacgccctgcccttctcccggacctgggacgactccttcaacaacaaggtgctggtgctgggctccgagaaccagaacaagggcaaccagaccccctacgagtacttcaacggcaaggacaactcccgggagtggcaggagttcaaggcccgggtggagacctcccggttcccccggtccaagaagcagcggatcctgctgcagaagttcgacgaggacggcttcaaggagtgcaacctgaacgacacccggtacgtgaaccgcttcctgtgccagttcgtggccgaccacatcctgctgaccggcaagggcaagcggcgggtgttcgcctccaacggccagatcaccaacctgctgcggggcttctggggcctgcggaaggtgcgggccgagaacgaccggcaccacgccctggacgccgtggtggtggcctgctccaccgtggccatgcagcagaagatcacccggttcgtgcggtacaaggagatgaacgccttcgacggcaagaccatcgacaaggagaccggcaaggtgctgcaccagaagacccacttcccccagccctgggagttcttcgcccaggaggtgatgatccgggtgttcggcaagcccgacggcaagcccgagttcgaggaggccgacacccccgagaagctgcggaccctgctggccgagaagctgtcctcccggcccgaggccgtgcacgagtacgtgacccccctgttcgtgtcccgggcccccaaccggaagatgtccggcgcccacaaggacaccctgcggtccgccaagcggttcgtgaagcacaacgagaagatctccgtgaagcgggtgtggctgaccgagatcaagctggccgacctggagaacatggtgaactacaagaacggccgggagatcgagctgtacgaggccctgaaggcccggctggaggcctacggcggcaacgccaagcaggccttcgaccccaaggacaaccccttctacaagaagggcggccagctggtgaaggccgtgcgggtggagaagacccaggagtccggcgtgctgctgaacaagaagaacgcctacaccatcgccgacaacggcgacatggtgcgggtggacgtgttctgcaaggtggacaagaagggcaagaaccagtacttcatcgtgcccatctacgcctggcaggtggccgagaacatcctgcccgacatcgactgcaagggctaccggatcgacgactcctacaccttctgcttctccctgcacaagtacgacctgatcgccttccagaaggacgagaagtccaaggtggagttcgcctactacatcaactgcgactcctccaacggccggttctacctggcctggcacgacaagggctccaaggagcagcagttccggatctccacccagaacctggtgctgatccagaagtaccaggtgaacgagctgggcaaggagatccggccctgccggctgaagaagcggccccccgtgcggtccggaaagcggaccgccgacggctccggaggaggaagcccgaagaagaagagaaaggtctag

SEQ ID NO: 52 - protein, 2541 aa, synthetic construct
  REGION 1..2541: note = Synthetic: Cas9-Cas9 fusion -71 amino acid residual linker (mRNA O)-amino acid sequence
MDKKYSIGLDIGTNSVGWAVITDEYKVPSKKFKVLGNTDRHSIKKNLIGALLFDSGETAEATRLKRTARRRYTRRKNRICYLQEIFSNEMAKVDDSFFHRLEESFLVEEDKKHERHPIFGNIVDEVAYHEKYPTIYHLRKKLVDSTDKADLRLIYLALAHMIKFRGHFLIEGDLNPDNSDVDKLFIQLVQTYNQLFEENPINASGVDAKAILSARLSKSRRLENLIAQLPGEKKNGLFGNLIALSLGLTPNFKSNFDLAEDAKLQLSKDTYDDDLDNLLAQIGDQYADLFLAAKNLSDAILLSDILRVNTEITKAPLSASMIKRYDEHHQDLTLLKALVRQQLPEKYKEIFFDQSKNGYAGYIDGGASQEEFYKFIKPILEKMDGTEELLVKLNREDLLRKQRTFDNGSIPHQIHLGELHAILRRQEDFYPFLKDNREKIEKILTFRIPYYVGPLARGNSRFAWMTRKSEETITPWNFEEVVDKGASAQSFIERMTNFDKNLPNEKVLPKHSLLYEYFTVYNELTKVKYVTEGMRKPAFLSGEQKKAIVDLLFKTNRKVTVKQLKEDYFKKIECFDSVEISGVEDRFNASLGTYHDLLKIIKDKDFLDNEENEDILEDIVLTLTLFEDREMIEERLKTYAHLFDDKVMKQLKRRRYTGWGRLSRKLINGIRDKQSGKTILDFLKSDGFANRNFMQLIHDDSLTFKEDIQKAQVSGQGDSLHEHIANLAGSPAIKKGILQTVKVVDELVKVMGRHKPENIVIEMARENQTTQKGQKNSRERMKRIEEGIKELGSQILKEHPVENTQLQNEKLYLYYLQNGRDMYVDQELDINRLSDYDVDHIVPQSFLKDDSIDNKVLTRSDKNRGKSDNVPSEEVVKKMKNYWRQLLNAKLITQRKFDNLTKAERGGLSELDKAGFIKRQLVETRQITKHVAQILDSRMNTKYDENDKLIREVKVITLKSKLVSDFRKDFQFYKVREINNYHHAHDAYLNAVVGTALIKKYPKLESEFVYGDYKVYDVRKMIAKSEQEIGKATAKYFFYSNIMNFFKTEITLANGEIRKRPLIETNGETGEIVWDKGRDFATVRKVLSMPQVNIVKKTEVQTGGFSKESILPKRNSDKLIARKKDWDPKKYGGFDSPTVAYSVLVVAKVEKGKSKKLKSVKELLGITIMERSSFEKNPIDFLEAKGYKEVKKDLIIKLPKYSLFELENGRKRMLASAGELQKGNELALPSKYVNFLYLASHYEKLKGSPEDNEQKQLFVEQHKHYLDEIIEQISEFSKRVILADANLDKVLSAYNKHRDKPIREQAENIIHLFTLTNLGAPAAFKYFDTTIDKKRYTSTKEVLDATLIHQSITGLYETRIDLSQLGGDGAPESATESGGTSTESEGSAGTSTESEGSAGSAGSTSTEEGTSTESEGSAGTSTESEGSAGTSESATGSSSGAAFKPNPINYILGLDIGIASVGWAMVEIDEEENPIRLIDLGVRVFERAEVPKTGDSLAMARRLARSVRRLTRRRAHRLLRARRLLKREGVLQAADFDENGLIKSLPNTPWQLRAAALDRKLTPLEWSAVLLHLIKHRGYLSQRKNEGETADKELGALLKGVANNAHALQTGDFRTPAELALNKFEKESGHIRNQRGDYSHTFSRKDLQAELILLFEKQKEFGNPHVSGGLKEGIETLLMTQRPALSGDAVQKMLGHCTFEPAEPKAAKNTYTAERFIWLTKLNNLRILEQGSERPLTDTERATLMDEPYRKSKLTYAQARKLLGLEDTAFFKGLRYGKDNAEASTLMEMKAYHAISRALEKEGLKDKKSPLNLSSELQDEIGTAFSLFKTDEDITGRLKDRVQPEILEALLKHISFDKFVQISLKALRRIVPLMEQGKRYDEACAEIYGDHYGKKNTEEKIYLPPIPADEIRNPVVLRALSQARKVINGVVRRYGSPARIHIETAREVGKSFKDRKEIEKRQEENRKDREKAAAKFREYFPNFVGEPKSKDILKLRLYEQQHGKCLYSGKEINLVRLNEKGYVEIDHALPFSRTWDDSFNNKVLVLGSENQNKGNQTPYEYFNGKDNSREWQEFKARVETSRFPRSKKQRILLQKFDEDGFKECNLNDTRYVNRFLCQFVADHILLTGKGKRRVFASNGQITNLLRGFWGLRKVRAENDRHHALDAVVVACSTVAMQQKITRFVRYKEMNAFDGKTIDKETGKVLHQKTHFPQPWEFFAQEVMIRVFGKPDGKPEFEEADTPEKLRTLLAEKLSSRPEAVHEYVTPLFVSRAPNRKMSGAHKDTLRSAKRFVKHNEKISVKRVWLTEIKLADLENMVNYKNGREIELYEALKARLEAYGGNAKQAFDPKDNPFYKKGGQLVKAVRVEKTQESGVLLNKKNAYTIADNGDMVRVDVFCKVDKKGKNQYFIVPIYAWQVAENILPDIDCKGYRIDDSYTFCFSLHKYDLIAFQKDEKSKVEFAYYINCDSSNGRFYLAWHDKGSKEQQFRISTQNLVLIQKYQVNELGKEIRPCRLKKRPPVRSGKRTADGSGGGSPKKKRKV

SEQ ID NO: 53 - RNA, 8213 nt, synthetic construct
  misc_feature 1..8213: note = Synthetic: Cas9-Cas9 fusion -61 amino acid residue linker and HiBit tag (mRNA P)-mRNA sequence
  source 1..8213: mol_type = other RNA
gggaagctcagaataaacgctcaactttggccggatctgccaccatggacaagaagtactccatcggcctggacatcggcaccaactccgtgggctgggccgtgatcaccgacgagtacaaggtgccctccaagaagttcaaggtgctgggcaacaccgaccggcactccatcaagaagaacctgatcggcgccctgctgttcgactccggcgagaccgccgaggccacccggctgaagcggaccgcccggcggcggtacacccggcggaagaaccggatctgctacctgcaggagatcttctccaacgagatggccaaggtggacgactccttcttccaccggctggaggagtccttcctggtggaggaggacaagaagcacgagcggcaccccatcttcggcaacatcgtggacgaggtggcctaccacgagaagtaccccaccatctaccacctgcggaagaagctggtggactccaccgacaaggccgacctgcggctgatctacctggccctggcccacatgatcaagttccggggccacttcctgatcgagggcgacctgaaccccgacaactccgacgtggacaagctgttcatccagctggtgcagacctacaaccagctgttcgaggagaaccccatcaacgcctccggcgtggacgccaaggccatcctgtccgcccggctgtccaagtcccggcggctggagaacctgatcgcccagctgcccggcgagaagaagaacggcctgttcggcaacctgatcgccctgtccctgggcctgacccccaacttcaagtccaacttcgacctggccgaggacgccaagctgcagctgtccaaggacacctacgacgacgacctggacaacctgctggcccagatcggcgaccagtacgccgacctgttcctggccgccaagaacctgtccgacgccatcctgctgtccgacatcctgcgggtgaacaccgagatcaccaaggcccccctgtccgcctccatgatcaagcggtacgacgagcaccaccaggacctgaccctgctgaaggccctggtgcggcagcagctgcccgagaagtacaaggagatcttcttcgaccagtccaagaacggctacgccggctacatcgacggcggcgcctcccaggaggagttctacaagttcatcaagcccatcctggagaagatggacggcaccgaggagctgctggtgaagctgaaccgggaggacctgctgcggaagcagcggaccttcgacaacggctccatcccccaccagatccacctgggcgagctgcacgccatcctgcggcggcaggaggacttctaccccttcctgaaggacaaccgggagaagatcgagaagatcctgaccttccggatcccctactacgtgggccccctggcccggggcaactcccggttcgcctggatgacccggaagtccgaggagaccatcaccccctggaacttcgaggaggtggtggacaagggcgcctccgcccagtccttcatcgagcggatgaccaacttcgacaagaacctgcccaacgagaaggtgctgcccaagcactccctgctgtacgagtacttcaccgtgtacaacgagctgaccaaggtgaagtacgtgaccgagggcatgcggaagcccgccttcctgtccggcgagcagaagaaggccatcgtggacctgctgttcaagaccaaccggaaggtgaccgtgaagcagctgaaggaggactacttcaagaagatcgagtgcttcgactccgtggagatctccggcgtggaggaccggttcaacgcctccctgggcacctaccacgacctgctgaagatcatcaaggacaaggacttcctggacaacgaggagaacgaggacatcctggaggacatcgtgctgaccctgaccctgttcgaggaccgggagatgatcgaggagcggctgaagacctacgcccacctgttcgacgacaaggtgatgaagcagctgaagcggcggcggtacaccggctggggccggctgtcccggaagctgatcaacggcatccgggacaagcagtccggcaagaccatcctggacttcctgaagtccgacggcttcgccaaccggaacttcatgcagctgatccacgacgactccctgaccttcaaggaggacatccagaaggcccaggtgtccggccagggcgactccctgcacgagcacatcgccaacctggccggctcccccgccatcaagaagggcatcctgcagaccgtgaaggtggtggacgagctggtgaaggtgatgggccggcacaagcccgagaacatcgtgatcgagatggcccgggagaaccagaccacccagaagggccagaagaactcccgggagcggatgaagcggatcgaggagggcatcaaggagctgggctcccagatcctgaaggagcaccccgtggagaacacccagctgcagaacgagaagctgtacctgtactacctgcagaacggccgggacatgtacgtggaccaggagctggacatcaaccggctgtccgactacgacgtggaccacatcgtgccccagtccttcctgaaggacgactccatcgacaacaaggtgctgacccggtccgacaagaaccggggcaagtccgacaacgtgccctccgaggaggtggtgaagaagatgaagaactactggcggcagctgctgaacgccaagctgatcacccagcggaagttcgacaacctgaccaaggccgagcggggcggcctgtccgagctggacaaggccggcttcatcaagcggcagctggtggagacccggcagatcaccaagcacgtggcccagatcctggactcccggatgaacaccaagtacgacgagaacgacaagctgatccgggaggtgaaggtgatcaccctgaagtccaagctggtgtccgacttccggaaggacttccagttctacaaggtgcgggagatcaacaactaccaccacgcccacgacgcctacctgaacgccgtggtgggcaccgccctgatcaagaagtaccccaagctggagtccgagttcgtgtacggcgactacaaggtgtacgacgtgcggaagatgatcgccaagtccgagcaggagatcggcaaggccaccgccaagtacttcttctactccaacatcatgaacttcttcaagaccgagatcaccctggccaacggcgagatccggaagcggcccctgatcgagaccaacggcgagaccggcgagatcgtgtgggacaagggccgggacttcgccaccgtgcggaaggtgctgtccatgccccaggtgaacatcgtgaagaagaccgaggtgcagaccggcggcttctccaaggagtccatcctgcccaagcggaactccgacaagctgatcgcccggaagaaggactgggaccccaagaagtacggcggcttcgactcccccaccgtggcctactccgtgctggtggtggccaaggtggagaagggcaagtccaagaagctgaagtccgtgaaggagctgctgggcatcaccatcatggagcggtcctccttcgagaagaaccccatcgacttcctggaggccaagggctacaaggaggtgaagaaggacctgatcatcaagctgcccaagtactccctgttcgagctggagaacggccggaagcggatgctggcctccgccggcgagctgcagaagggcaacgagctggccctgccctccaagtacgtgaacttcctgtacctggcctcccactacgagaagctgaagggctcccccgaggacaacgagcagaagcagctgttcgtggagcagcacaagcactacctggacgagatcatcgagcagatctccgagttctccaagcgggtgatcctggccgacgccaacctggacaaggtgctgtccgcctacaacaagcaccgggacaagcccatccgggagcaggccgagaacatcatccacctgttcaccctgaccaacctgggcgcccccgccgccttcaagtacttcgacaccaccatcgacaagaagcggtacacctccaccaaggaggtgctggacgccaccctgatccaccagtccatcaccggcctgtacgagacccggatcgacctgtcccagctgggcggcgacggcgcccccgagtccgccaccgagtccggcggcacctccaccgagtccgagggctccgccggcacctccaccgagtccgagggctccgccggctccgccggctccacctccaccgaggagggcacctccaccgagtccgagggctccgccggcacctccaccgagtccgagggctcctcctccggtgccgccttcaagcccaaccccatcaactacatcctgggcctggacatcggcatcgcctccgtgggctgggccatggtggagatcgacgaggaggagaaccccatccggctgatcgacctgggcgtgcgggtgttcgagcgggccgaggtgcccaagaccggcgactccctggccatggcccggcggctggcccggtccgtgcggcggctgacccggcggcgggcccaccggctgctgcgggcccggcggctgctgaagcgggagggcgtgctgcaggccgccgacttcgacgagaacggcctgatcaagtccctgcccaacaccccctggcagctgcgggccgccgccctggaccggaagctgacccccctggagtggtccgccgtgctgctgcacctgatcaagcaccggggctacctgtcccagcggaagaacgagggcgagaccgccgacaaggagctgggcgccctgctgaagggcgtggccaacaacgcccacgccctgcagaccggcgacttccggacccccgccgagctggccctgaacaagttcgagaaggagtccggccacatccggaaccagcggggcgactactcccacaccttctcccggaaggacctgcaggccgagctgatcctgctgttcgagaagcagaaggagttcggcaacccccacgtgtccggcggcctgaaggagggcatcgagaccctgctgatgacccagcggcccgccctgtccggcgacgccgtgcagaagatgctgggccactgcaccttcgagcccgccgagcccaaggccgccaagaacacctacaccgccgagcggttcatctggctgaccaagctgaacaacctgcggatcctggagcagggctccgagcggcccctgaccgacaccgagcgggccaccctgatggacgagccctaccggaagtccaagctgacctacgcccaggcccggaagctgctgggcctggaggacaccgccttcttcaagggcctgcggtacggcaaggacaacgccgaggcctccaccctgatggagatgaaggcctaccacgccatctcccgggccctggagaaggagggcctgaaggacaagaagtcccccctgaacctgtcctccgagctgcaggacgagatcggcaccgccttctccctgttcaagaccgacgaggacatcaccggccggctgaaggaccgggtgcagcccgagatcctggaggccctgctgaagcacatctccttcgacaagttcgtgcagatctccctgaaggccctgcggcggatcgtgcccctgatggagcagggcaagcggtacgacgaggcctgcgccgagatctacggcgaccactacggcaagaagaacaccgaggagaagatctacctgccccccatccccgccgacgagatccggaaccccgtggtgctgcgggccctgtcccaggcccggaaggtgatcaacggcgtggtgcggcggtacggctcccccgcccggatccacatcgagaccgcccgggaggtgggcaagtccttcaaggaccggaaggagatcgagaagcggcaggaggagaaccggaaggaccgggagaaggccgccgccaagttccgggagtacttccccaacttcgtgggcgagcccaagtccaaggacatcctgaagctgcggctgtacgagcagcagcacggcaagtgcctgtactccggcaaggagatcaacctggtgcggctgaacgagaagggctacgtggagatcgaccacgccctgcccttctcccggacctgggacgactccttcaacaacaaggtgctggtgctgggctccgagaaccagaacaagggcaaccagaccccctacgagtacttcaacggcaaggacaactcccgggagtggcaggagttcaaggcccgggtggagacctcccggttcccccggtccaagaagcagcggatcctgctgcagaagttcgacgaggacggcttcaaggagtgcaacctgaacgacacccggtacgtgaaccgcttcctgtgccagttcgtggccgaccacatcctgctgaccggcaagggcaagcggcgggtgttcgcctccaacggccagatcaccaacctgctgcggggcttctggggcctgcggaaggtgcgggccgagaacgaccggcaccacgccctggacgccgtggtggtggcctgctccaccgtggccatgcagcagaagatcacccggttcgtgcggtacaaggagatgaacgccttcgacggcaagaccatcgacaaggagaccggcaaggtgctgcaccagaagacccacttcccccagccctgggagttcttcgcccaggaggtgatgatccgggtgttcggcaagcccgacggcaagcccgagttcgaggaggccgacacccccgagaagctgcggaccctgctggccgagaagctgtcctcccggcccgaggccgtgcacgagtacgtgacccccctgttcgtgtcccgggcccccaaccggaagatgtccggcgcccacaaggacaccctgcggtccgccaagcggttcgtgaagcacaacgagaagatctccgtgaagcgggtgtggctgaccgagatcaagctggccgacctggagaacatggtgaactacaagaacggccgggagatcgagctgtacgaggccctgaaggcccggctggaggcctacggcggcaacgccaagcaggccttcgaccccaaggacaaccccttctacaagaagggcggccagctggtgaaggccgtgcgggtggagaagacccaggagtccggcgtgctgctgaacaagaagaacgcctacaccatcgccgacaacggcgacatggtgcgggtggacgtgttctgcaaggtggacaagaagggcaagaaccagtacttcatcgtgcccatctacgcctggcaggtggccgagaacatcctgcccgacatcgactgcaagggctaccggatcgacgactcctacaccttctgcttctccctgcacaagtacgacctgatcgccttccagaaggacgagaagtccaaggtggagttcgcctactacatcaactgcgactcctccaacggccggttctacctggcctggcacgacaagggctccaaggagcagcagttccggatctccacccagaacctggtgctgatccagaagtaccaggtgaacgagctgggcaaggagatccggccctgccggctgaagaagcggccccccgtgcggtccggaaagcggaccgccgacggctccggaggaggaagcccgaagaagaagagaaaggtcagcgaaagcgcaacaccggaaagcgtcagcggatggagactgttcaagaagatcagctagctagcaccagcctcaagaacacccgaatggagtctctaagctacataataccaacttacactttacaaaatgttgtcccccaaaatgtagccattcgtatctgctcctaataaaaagaaagtttcttcacattctctcgagaaaaaaaaaaaatggaaaaaaaaaaaacggaaaaaaaaaaaaggtaaaaaaaaaaaatataaaaaaaaaaaacataaaaaaaaaaaacgaaaaaaaaaaaacgtaaaaaaaaaaaactcaaaaaaaaaaaagataaaaaaaaaaaacctaaaaaaaaaaaatgtaaaaaaaaaaaagggaaaaaaaaaaaacgcaaaaaaaaaaaacacaaaaaaaaaaaatgcaaaaaaaaaaaatcgaaaaaaaaaaaatctaaaaaaaaaaaacgaaaaaaaaaaaacccaaaaaaaaaaaagacaaaaaaaaaaaatagaaaaaaaaaaaagttaaaaaaaaaaaactgaaaaaaaaaaaatttaaaaaaaaaaaatctag

SEQ ID NO: 54 - RNA, 7653 nt, synthetic construct
  misc_feature 1..7653: note = Synthetic: Cas9-Cas9 fusion -61 amino acid residue linker and HiBit tag (mRNA P)-ORF sequence
  source 1..7653: mol_type = other RNA
atggacaagaagtactccatcggcctggacatcggcaccaactccgtgggctgggccgtgatcaccgacgagtacaaggtgccctccaagaagttcaaggtgctgggcaacaccgaccggcactccatcaagaagaacctgatcggcgccctgctgttcgactccggcgagaccgccgaggccacccggctgaagcggaccgcccggcggcggtacacccggcggaagaaccggatctgctacctgcaggagatcttctccaacgagatggccaaggtggacgactccttcttccaccggctggaggagtccttcctggtggaggaggacaagaagcacgagcggcaccccatcttcggcaacatcgtggacgaggtggcctaccacgagaagtaccccaccatctaccacctgcggaagaagctggtggactccaccgacaaggccgacctgcggctgatctacctggccctggcccacatgatcaagttccggggccacttcctgatcgagggcgacctgaaccccgacaactccgacgtggacaagctgttcatccagctggtgcagacctacaaccagctgttcgaggagaaccccatcaacgcctccggcgtggacgccaaggccatcctgtccgcccggctgtccaagtcccggcggctggagaacctgatcgcccagctgcccggcgagaagaagaacggcctgttcggcaacctgatcgccctgtccctgggcctgacccccaacttcaagtccaacttcgacctggccgaggacgccaagctgcagctgtccaaggacacctacgacgacgacctggacaacctgctggcccagatcggcgaccagtacgccgacctgttcctggccgccaagaacctgtccgacgccatcctgctgtccgacatcctgcgggtgaacaccgagatcaccaaggcccccctgtccgcctccatgatcaagcggtacgacgagcaccaccaggacctgaccctgctgaaggccctggtgcggcagcagctgcccgagaagtacaaggagatcttcttcgaccagtccaagaacggctacgccggctacatcgacggcggcgcctcccaggaggagttctacaagttcatcaagcccatcctggagaagatggacggcaccgaggagctgctggtgaagctgaaccgggaggacctgctgcggaagcagcggaccttcgacaacggctccatcccccaccagatccacctgggcgagctgcacgccatcctgcggcggcaggaggacttctaccccttcctgaaggacaaccgggagaagatcgagaagatcctgaccttccggatcccctactacgtgggccccctggcccggggcaactcccggttcgcctggatgacccggaagtccgaggagaccatcaccccctggaacttcgaggaggtggtggacaagggcgcctccgcccagtccttcatcgagcggatgaccaacttcgacaagaacctgcccaacgagaaggtgctgcccaagcactccctgctgtacgagtacttcaccgtgtacaacgagctgaccaaggtgaagtacgtgaccgagggcatgcggaagcccgccttcctgtccggcgagcagaagaaggccatcgtggacctgctgttcaagaccaaccggaaggtgaccgtgaagcagctgaaggaggactacttcaagaagatcgagtgcttcgactccgtggagatctccggcgtggaggaccggttcaacgcctccctgggcacctaccacgacctgctgaagatcatcaaggacaaggacttcctggacaacgaggagaacgaggacatcctggaggacatcgtgctgaccctgaccctgttcgaggaccgggagatgatcgaggagcggctgaagacctacgcccacctgttcgacgacaaggtgatgaagcagctgaagcggcggcggtacaccggctggggccggctgtcccggaagctgatcaacggcatccgggacaagcagtccggcaagaccatcctggacttcctgaagtccgacggcttcgccaaccggaacttcatgcagctgatccacgacgactccctgaccttcaaggaggacatccagaaggcccaggtgtccggccagggcgactccctgcacgagcacatcgccaacctggccggctcccccgccatcaagaagggcatcctgcagaccgtgaaggtggtggacgagctggtgaaggtgatgggccggcacaagcccgagaacatcgtgatcgagatggcccgggagaaccagaccacccagaagggccagaagaactcccgggagcggatgaagcggatcgaggagggcatcaaggagctgggctcccagatcctgaaggagcaccccgtggagaacacccagctgcagaacgagaagctgtacctgtactacctgcagaacggccgggacatgtacgtggaccaggagctggacatcaaccggctgtccgactacgacgtggaccacatcgtgccccagtccttcctgaaggacgactccatcgacaacaaggtgctgacccggtccgacaagaaccggggcaagtccgacaacgtgccctccgaggaggtggtgaagaagatgaagaactactggcggcagctgctgaacgccaagctgatcacccagcggaagttcgacaacctgaccaaggccgagcggggcggcctgtccgagctggacaaggccggcttcatcaagcggcagctggtggagacccggcagatcaccaagcacgtggcccagatcctggactcccggatgaacaccaagtacgacgagaacgacaagctgatccgggaggtgaaggtgatcaccctgaagtccaagctggtgtccgacttccggaaggacttccagttctacaaggtgcgggagatcaacaactaccaccacgcccacgacgcctacctgaacgccgtggtgggcaccgccctgatcaagaagtaccccaagctggagtccgagttcgtgtacggcgactacaaggtgtacgacgtgcggaagatgatcgccaagtccgagcaggagatcggcaaggccaccgccaagtacttcttctactccaacatcatgaacttcttcaagaccgagatcaccctggccaacggcgagatccggaagcggcccctgatcgagaccaacggcgagaccggcgagatcgtgtgggacaagggccgggacttcgccaccgtgcggaaggtgctgtccatgccccaggtgaacatcgtgaagaagaccgaggtgcagaccggcggcttctccaaggagtccatcctgcccaagcggaactccgacaagctgatcgcccggaagaaggactgggaccccaagaagtacggcggcttcgactcccccaccgtggcctactccgtgctggtggtggccaaggtggagaagggcaagtccaagaagctgaagtccgtgaaggagctgctgggcatcaccatcatggagcggtcctccttcgagaagaaccccatcgacttcctggaggccaagggctacaaggaggtgaagaaggacctgatcatcaagctgcccaagtactccctgttcgagctggagaacggccggaagcggatgctggcctccgccggcgagctgcagaagggcaacgagctggccctgccctccaagtacgtgaacttcctgtacctggcctcccactacgagaagctgaagggctcccccgaggacaacgagcagaagcagctgttcgtggagcagcacaagcactacctggacgagatcatcgagcagatctccgagttctccaagcgggtgatcctggccgacgccaacctggacaaggtgctgtccgcctacaacaagcaccgggacaagcccatccgggagcaggccgagaacatcatccacctgttcaccctgaccaacctgggcgcccccgccgccttcaagtacttcgacaccaccatcgacaagaagcggtacacctccaccaaggaggtgctggacgccaccctgatccaccagtccatcaccggcctgtacgagacccggatcgacctgtcccagctgggcggcgacggcgcccccgagtccgccaccgagtccggcggcacctccaccgagtccgagggctccgccggcacctccaccgagtccgagggctccgccggctccgccggctccacctccaccgaggagggcacctccaccgagtccgagggctccgccggcacctccaccgagtccgagggctcctcctccggtgccgccttcaagcccaaccccatcaactacatcctgggcctggacatcggcatcgcctccgtgggctgggccatggtggagatcgacgaggaggagaaccccatccggctgatcgacctgggcgtgcgggtgttcgagcgggccgaggtgcccaagaccggcgactccctggccatggcccggcggctggcccggtccgtgcggcggctgacccggcggcgggcccaccggctgctgcgggcccggcggctgctgaagcgggagggcgtgctgcaggccgccgacttcgacgagaacggcctgatcaagtccctgcccaacaccccctggcagctgcgggccgccgccctggaccggaagctgacccccctggagtggtccgccgtgctgctgcacctgatcaagcaccggggctacctgtcccagcggaagaacgagggcgagaccgccgacaaggagctgggcgccctgctgaagggcgtggccaacaacgcccacgccctgcagaccggcgacttccggacccccgccgagctggccctgaacaagttcgagaaggagtccggccacatccggaaccagcggggcgactactcccacaccttctcccggaaggacctgcaggccgagctgatcctgctgttcgagaagcagaaggagttcggcaacccccacgtgtccggcggcctgaaggagggcatcgagaccctgctgatgacccagcggcccgccctgtccggcgacgccgtgcagaagatgctgggccactgcaccttcgagcccgccgagcccaaggccgccaagaacacctacaccgccgagcggttcatctggctgaccaagctgaacaacctgcggatcctggagcagggctccgagcggcccctgaccgacaccgagcgggccaccctgatggacgagccctaccggaagtccaagctgacctacgcccaggcccggaagctgctgggcctggaggacaccgccttcttcaagggcctgcggtacggcaaggacaacgccgaggcctccaccctgatggagatgaaggcctaccacgccatctcccgggccctggagaaggagggcctgaaggacaagaagtcccccctgaacctgtcctccgagctgcaggacgagatcggcaccgccttctccctgttcaagaccgacgaggacatcaccggccggctgaaggaccgggtgcagcccgagatcctggaggccctgctgaagcacatctccttcgacaagttcgtgcagatctccctgaaggccctgcggcggatcgtgcccctgatggagcagggcaagcggtacgacgaggcctgcgccgagatctacggcgaccactacggcaagaagaacaccgaggagaagatctacctgccccccatccccgccgacgagatccggaaccccgtggtgctgcgggccctgtcccaggcccggaaggtgatcaacggcgtggtgcggcggtacggctcccccgcccggatccacatcgagaccgcccgggaggtgggcaagtccttcaaggaccggaaggagatcgagaagcggcaggaggagaaccggaaggaccgggagaaggccgccgccaagttccgggagtacttccccaacttcgtgggcgagcccaagtccaaggacatcctgaagctgcggctgtacgagcagcagcacggcaagtgcctgtactccggcaaggagatcaacctggtgcggctgaacgagaagggctacgtggagatcgaccacgccctgcccttctcccggacctgggacgactccttcaacaacaaggtgctggtgctgggctccgagaaccagaacaagggcaaccagaccccctacgagtacttcaacggcaaggacaactcccgggagtggcaggagttcaaggcccgggtggagacctcccggttcccccggtccaagaagcagcggatcctgctgcagaagttcgacgaggacggcttcaaggagtgcaacctgaacgacacccggtacgtgaaccgcttcctgtgccagttcgtggccgaccacatcctgctgaccggcaagggcaagcggcgggtgttcgcctccaacggccagatcaccaacctgctgcggggcttctggggcctgcggaaggtgcgggccgagaacgaccggcaccacgccctggacgccgtggtggtggcctgctccaccgtggccatgcagcagaagatcacccggttcgtgcggtacaaggagatgaacgccttcgacggcaagaccatcgacaaggagaccggcaaggtgctgcaccagaagacccacttcccccagccctgggagttcttcgcccaggaggtgatgatccgggtgttcggcaagcccgacggcaagcccgagttcgaggaggccgacacccccgagaagctgcggaccctgctggccgagaagctgtcctcccggcccgaggccgtgcacgagtacgtgacccccctgttcgtgtcccgggcccccaaccggaagatgtccggcgcccacaaggacaccctgcggtccgccaagcggttcgtgaagcacaacgagaagatctccgtgaagcgggtgtggctgaccgagatcaagctggccgacctggagaacatggtgaactacaagaacggccgggagatcgagctgtacgaggccctgaaggcccggctggaggcctacggcggcaacgccaagcaggccttcgaccccaaggacaaccccttctacaagaagggcggccagctggtgaaggccgtgcgggtggagaagacccaggagtccggcgtgctgctgaacaagaagaacgcctacaccatcgccgacaacggcgacatggtgcgggtggacgtgttctgcaaggtggacaagaagggcaagaaccagtacttcatcgtgcccatctacgcctggcaggtggccgagaacatcctgcccgacatcgactgcaagggctaccggatcgacgactcctacaccttctgcttctccctgcacaagtacgacctgatcgccttccagaaggacgagaagtccaaggtggagttcgcctactacatcaactgcgactcctccaacggccggttctacctggcctggcacgacaagggctccaaggagcagcagttccggatctccacccagaacctggtgctgatccagaagtaccaggtgaacgagctgggcaaggagatccggccctgccggctgaagaagcggccccccgtgcggtccggaaagcggaccgccgacggctccggaggaggaagcccgaagaagaagagaaaggtcagcgaaagcgcaacaccggaaagcgtcagcggatggagactgttcaagaagatcagctag

SEQ ID NO: 55 - protein, 2550 aa, synthetic construct
  REGION 1..2550: note = Synthetic: Cas9-Cas9 fusion -61 amino acid residue linker and HiBit tag (mRNA P)-amino acid sequence
MDKKYSIGLDIGTNSVGWAVITDEYKVPSKKFKVLGNTDRHSIKKNLIGALLFDSGETAEATRLKRTARRRYTRRKNRICYLQEIFSNEMAKVDDSFFHRLEESFLVEEDKKHERHPIFGNIVDEVAYHEKYPTIYHLRKKLVDSTDKADLRLIYLALAHMIKFRGHFLIEGDLNPDNSDVDKLFIQLVQTYNQLFEENPINASGVDAKAILSARLSKSRRLENLIAQLPGEKKNGLFGNLIALSLGLTPNFKSNFDLAEDAKLQLSKDTYDDDLDNLLAQIGDQYADLFLAAKNLSDAILLSDILRVNTEITKAPLSASMIKRYDEHHQDLTLLKALVRQQLPEKYKEIFFDQSKNGYAGYIDGGASQEEFYKFIKPILEKMDGTEELLVKLNREDLLRKQRTFDNGSIPHQIHLGELHAILRRQEDFYPFLKDNREKIEKILTFRIPYYVGPLARGNSRFAWMTRKSEETITPWNFEEVVDKGASAQSFIERMTNFDKNLPNEKVLPKHSLLYEYFTVYNELTKVKYVTEGMRKPAFLSGEQKKAIVDLLFKTNRKVTVKQLKEDYFKKIECFDSVEISGVEDRFNASLGTYHDLLKIIKDKDFLDNEENEDILEDIVLTLTLFEDREMIEERLKTYAHLFDDKVMKQLKRRRYTGWGRLSRKLINGIRDKQSGKTILDFLKSDGFANRNFMQLIHDDSLTFKEDIQKAQVSGQGDSLHEHIANLAGSPAIKKGILQTVKVVDELVKVMGRHKPENIVIEMARENQTTQKGQKNSRERMKRIEEGIKELGSQILKEHPVENTQLQNEKLYLYYLQNGRDMYVDQELDINRLSDYDVDHIVPQSFLKDDSIDNKVLTRSDKNRGKSDNVPSEEVVKKMKNYWRQLLNAKLITQRKFDNLTKAERGGLSELDKAGFIKRQLVETRQITKHVAQILDSRMNTKYDENDKLIREVKVITLKSKLVSDFRKDFQFYKVREINNYHHAHDAYLNAVVGTALIKKYPKLESEFVYGDYKVYDVRKMIAKSEQEIGKATAKYFFYSNIMNFFKTEITLANGEIRKRPLIETNGETGEIVWDKGRDFATVRKVLSMPQVNIVKKTEVQTGGFSKESILPKRNSDKLIARKKDWDPKKYGGFDSPTVAYSVLVVAKVEKGKSKKLKSVKELLGITIMERSSFEKNPIDFLEAKGYKEVKKDLIIKLPKYSLFELENGRKRMLASAGELQKGNELALPSKYVNFLYLASHYEKLKGSPEDNEQKQLFVEQHKHYLDEIIEQISEFSKRVILADANLDKVLSAYNKHRDKPIREQAENIIHLFTLTNLGAPAAFKYFDTTIDKKRYTSTKEVLDATLIHQSITGLYETRIDLSQLGGDGAPESATESGGTSTESEGSAGTSTESEGSAGSAGSTSTEEGTSTESEGSAGTSTESEGSSSGAAFKPNPINYILGLDIGIASVGWAMVEIDEEENPIRLIDLGVRVFERAEVPKTGDSLAMARRLARSVRRLTRRRAHRLLRARRLLKREGVLQAADFDENGLIKSLPNTPWQLRAAALDRKLTPLEWSAVLLHLIKHRGYLSQRKNEGETADKELGALLKGVANNAHALQTGDFRTPAELALNKFEKESGHIRNQRGDYSHTFSRKDLQAELILLFEKQKEFGNPHVSGGLKEGIETLLMTQRPALSGDAVQKMLGHCTFEPAEPKAAKNTYTAERFIWLTKLNNLRILEQGSERPLTDTERATLMDEPYRKSKLTYAQARKLLGLEDTAFFKGLRYGKDNAEASTLMEMKAYHAISRALEKEGLKDKKSPLNLSSELQDEIGTAFSLFKTDEDITGRLKDRVQPEILEALLKHISFDKFVQISLKALRRIVPLMEQGKRYDEACAEIYGDHYGKKNTEEKIYLPPIPADEIRNPVVLRALSQARKVINGVVRRYGSPARIHIETAREVGKSFKDRKEIEKRQEENRKDREKAAAKFREYFPNFVGEPKSKDILKLRLYEQQHGKCLYSGKEINLVRLNEKGYVEIDHALPFSRTWDDSFNNKVLVLGSENQNKGNQTPYEYFNGKDNSREWQEFKARVETSRFPRSKKQRILLQKFDEDGFKECNLNDTRYVNRFLCQFVADHILLTGKGKRRVFASNGQITNLLRGFWGLRKVRAENDRHHALDAVVVACSTVAMQQKITRFVRYKEMNAFDGKTIDKETGKVLHQKTHFPQPWEFFAQEVMIRVFGKPDGKPEFEEADTPEKLRTLLAEKLSSRPEAVHEYVTPLFVSRAPNRKMSGAHKDTLRSAKRFVKHNEKISVKRVWLTEIKLADLENMVNYKNGREIELYEALKARLEAYGGNAKQAFDPKDNPFYKKGGQLVKAVRVEKTQESGVLLNKKNAYTIADNGDMVRVDVFCKVDKKGKNQYFIVPIYAWQVAENILPDIDCKGYRIDDSYTFCFSLHKYDLIAFQKDEKSKVEFAYYINCDSSNGRFYLAWHDKGSKEQQFRISTQNLVLIQKYQVNELGKEIRPCRLKKRPPVRSGKRTADGSGGGSPKKKRKVSESATPESVSGWRLFKKIS

SEQ ID NO: 56 - RNA, 7596 nt, synthetic construct
  misc_feature 1..7596: note = Synthetic: Cas9-Cas9 fusion -61 amino acid residual linker (mRNA P)-mRNA sequence
  source 1..7596: mol_type = other RNA
atggacaagaagtactccatcggcctggacatcggcaccaactccgtgggctgggccgtgatcaccgacgagtacaaggtgccctccaagaagttcaaggtgctgggcaacaccgaccggcactccatcaagaagaacctgatcggcgccctgctgttcgactccggcgagaccgccgaggccacccggctgaagcggaccgcccggcggcggtacacccggcggaagaaccggatctgctacctgcaggagatcttctccaacgagatggccaaggtggacgactccttcttccaccggctggaggagtccttcctggtggaggaggacaagaagcacgagcggcaccccatcttcggcaacatcgtggacgaggtggcctaccacgagaagtaccccaccatctaccacctgcggaagaagctggtggactccaccgacaaggccgacctgcggctgatctacctggccctggcccacatgatcaagttccggggccacttcctgatcgagggcgacctgaaccccgacaactccgacgtggacaagctgttcatccagctggtgcagacctacaaccagctgttcgaggagaaccccatcaacgcctccggcgtggacgccaaggccatcctgtccgcccggctgtccaagtcccggcggctggagaacctgatcgcccagctgcccggcgagaagaagaacggcctgttcggcaacctgatcgccctgtccctgggcctgacccccaacttcaagtccaacttcgacctggccgaggacgccaagctgcagctgtccaaggacacctacgacgacgacctggacaacctgctggcccagatcggcgaccagtacgccgacctgttcctggccgccaagaacctgtccgacgccatcctgctgtccgacatcctgcgggtgaacaccgagatcaccaaggcccccctgtccgcctccatgatcaagcggtacgacgagcaccaccaggacctgaccctgctgaaggccctggtgcggcagcagctgcccgagaagtacaaggagatcttcttcgaccagtccaagaacggctacgccggctacatcgacggcggcgcctcccaggaggagttctacaagttcatcaagcccatcctggagaagatggacggcaccgaggagctgctggtgaagctgaaccgggaggacctgctgcggaagcagcggaccttcgacaacggctccatcccccaccagatccacctgggcgagctgcacgccatcctgcggcggcaggaggacttctaccccttcctgaaggacaaccgggagaagatcgagaagatcctgaccttccggatcccctactacgtgggccccctggcccggggcaactcccggttcgcctggatgacccggaagtccgaggagaccatcaccccctggaacttcgaggaggtggtggacaagggcgcctccgcccagtccttcatcgagcggatgaccaacttcgacaagaacctgcccaacgagaaggtgctgcccaagcactccctgctgtacgagtacttcaccgtgtacaacgagctgaccaaggtgaagtacgtgaccgagggcatgcggaagcccgccttcctgtccggcgagcagaagaaggccatcgtggacctgctgttcaagaccaaccggaaggtgaccgtgaagcagctgaaggaggactacttcaagaagatcgagtgcttcgactccgtggagatctccggcgtggaggaccggttcaacgcctccctgggcacctaccacgacctgctgaagatcatcaaggacaaggacttcctggacaacgaggagaacgaggacatcctggaggacatcgtgctgaccctgaccctgttcgaggaccgggagatgatcgaggagcggctgaagacctacgcccacctgttcgacgacaaggtgatgaagcagctgaagcggcggcggtacaccggctggggccggctgtcccggaagctgatcaacggcatccgggacaagcagtccggcaagaccatcctggacttcctgaagtccgacggcttcgccaaccggaacttcatgcagctgatccacgacgactccctgaccttcaaggaggacatccagaaggcccaggtgtccggccagggcgactccctgcacgagcacatcgccaacctggccggctcccccgccatcaagaagggcatcctgcagaccgtgaaggtggtggacgagctggtgaaggtgatgggccggcacaagcccgagaacatcgtgatcgagatggcccgggagaaccagaccacccagaagggccagaagaactcccgggagcggatgaagcggatcgaggagggcatcaaggagctgggctcccagatcctgaaggagcaccccgtggagaacacccagctgcagaacgagaagctgtacctgtactacctgcagaacggccgggacatgtacgtggaccaggagctggacatcaaccggctgtccgactacgacgtggaccacatcgtgccccagtccttcctgaaggacgactccatcgacaacaaggtgctgacccggtccgacaagaaccggggcaagtccgacaacgtgccctccgaggaggtggtgaagaagatgaagaactactggcggcagctgctgaacgccaagctgatcacccagcggaagttcgacaacctgaccaaggccgagcggggcggcctgtccgagctggacaaggccggcttcatcaagcggcagctggtggagacccggcagatcaccaagcacgtggcccagatcctggactcccggatgaacaccaagtacgacgagaacgacaagctgatccgggaggtgaaggtgatcaccctgaagtccaagctggtgtccgacttccggaaggacttccagttctacaaggtgcgggagatcaacaactaccaccacgcccacgacgcctacctgaacgccgtggtgggcaccgccctgatcaagaagtaccccaagctggagtccgagttcgtgtacggcgactacaaggtgtacgacgtgcggaagatgatcgccaagtccgagcaggagatcggcaaggccaccgccaagtacttcttctactccaacatcatgaacttcttcaagaccgagatcaccctggccaacggcgagatccggaagcggcccctgatcgagaccaacggcgagaccggcgagatcgtgtgggacaagggccgggacttcgccaccgtgcggaaggtgctgtccatgccccaggtgaacatcgtgaagaagaccgaggtgcagaccggcggcttctccaaggagtccatcctgcccaagcggaactccgacaagctgatcgcccggaagaaggactgggaccccaagaagtacggcggcttcgactcccccaccgtggcctactccgtgctggtggtggccaaggtggagaagggcaagtccaagaagctgaagtccgtgaaggagctgctgggcatcaccatcatggagcggtcctccttcgagaagaaccccatcgacttcctggaggccaagggctacaaggaggtgaagaaggacctgatcatcaagctgcccaagtactccctgttcgagctggagaacggccggaagcggatgctggcctccgccggcgagctgcagaagggcaacgagctggccctgccctccaagtacgtgaacttcctgtacctggcctcccactacgagaagctgaagggctcccccgaggacaacgagcagaagcagctgttcgtggagcagcacaagcactacctggacgagatcatcgagcagatctccgagttctccaagcgggtgatcctggccgacgccaacctggacaaggtgctgtccgcctacaacaagcaccgggacaagcccatccgggagcaggccgagaacatcatccacctgttcaccctgaccaacctgggcgcccccgccgccttcaagtacttcgacaccaccatcgacaagaagcggtacacctccaccaaggaggtgctggacgccaccctgatccaccagtccatcaccggcctgtacgagacccggatcgacctgtcccagctgggcggcgacggcgcccccgagtccgccaccgagtccggcggcacctccaccgagtccgagggctccgccggcacctccaccgagtccgagggctccgccggctccgccggctccacctccaccgaggagggcacctccaccgagtccgagggctccgccggcacctccaccgagtccgagggctcctcctccggtgccgccttcaagcccaaccccatcaactacatcctgggcctggacatcggcatcgcctccgtgggctgggccatggtggagatcgacgaggaggagaaccccatccggctgatcgacctgggcgtgcgggtgttcgagcgggccgaggtgcccaagaccggcgactccctggccatggcccggcggctggcccggtccgtgcggcggctgacccggcggcgggcccaccggctgctgcgggcccggcggctgctgaagcgggagggcgtgctgcaggccgccgacttcgacgagaacggcctgatcaagtccctgcccaacaccccctggcagctgcgggccgccgccctggaccggaagctgacccccctggagtggtccgccgtgctgctgcacctgatcaagcaccggggctacctgtcccagcggaagaacgagggcgagaccgccgacaaggagctgggcgccctgctgaagggcgtggccaacaacgcccacgccctgcagaccggcgacttccggacccccgccgagctggccctgaacaagttcgagaaggagtccggccacatccggaaccagcggggcgactactcccacaccttctcccggaaggacctgcaggccgagctgatcctgctgttcgagaagcagaaggagttcggcaacccccacgtgtccggcggcctgaaggagggcatcgagaccctgctgatgacccagcggcccgccctgtccggcgacgccgtgcagaagatgctgggccactgcaccttcgagcccgccgagcccaaggccgccaagaacacctacaccgccgagcggttcatctggctgaccaagctgaacaacctgcggatcctggagcagggctccgagcggcccctgaccgacaccgagcgggccaccctgatggacgagccctaccggaagtccaagctgacctacgcccaggcccggaagctgctgggcctggaggacaccgccttcttcaagggcctgcggtacggcaaggacaacgccgaggcctccaccctgatggagatgaaggcctaccacgccatctcccgggccctggagaaggagggcctgaaggacaagaagtcccccctgaacctgtcctccgagctgcaggacgagatcggcaccgccttctccctgttcaagaccgacgaggacatcaccggccggctgaaggaccgggtgcagcccgagatcctggaggccctgctgaagcacatctccttcgacaagttcgtgcagatctccctgaaggccctgcggcggatcgtgcccctgatggagcagggcaagcggtacgacgaggcctgcgccgagatctacggcgaccactacggcaagaagaacaccgaggagaagatctacctgccccccatccccgccgacgagatccggaaccccgtggtgctgcgggccctgtcccaggcccggaaggtgatcaacggcgtggtgcggcggtacggctcccccgcccggatccacatcgagaccgcccgggaggtgggcaagtccttcaaggaccggaaggagatcgagaagcggcaggaggagaaccggaaggaccgggagaaggccgccgccaagttccgggagtacttccccaacttcgtgggcgagcccaagtccaaggacatcctgaagctgcggctgtacgagcagcagcacggcaagtgcctgtactccggcaaggagatcaacctggtgcggctgaacgagaagggctacgtggagatcgaccacgccctgcccttctcccggacctgggacgactccttcaacaacaaggtgctggtgctgggctccgagaaccagaacaagggcaaccagaccccctacgagtacttcaacggcaaggacaactcccgggagtggcaggagttcaaggcccgggtggagacctcccggttcccccggtccaagaagcagcggatcctgctgcagaagttcgacgaggacggcttcaaggagtgcaacctgaacgacacccggtacgtgaaccgcttcctgtgccagttcgtggccgaccacatcctgctgaccggcaagggcaagcggcgggtgttcgcctccaacggccagatcaccaacctgctgcggggcttctggggcctgcggaaggtgcgggccgagaacgaccggcaccacgccctggacgccgtggtggtggcctgctccaccgtggccatgcagcagaagatcacccggttcgtgcggtacaaggagatgaacgccttcgacggcaagaccatcgacaaggagaccggcaaggtgctgcaccagaagacccacttcccccagccctgggagttcttcgcccaggaggtgatgatccgggtgttcggcaagcccgacggcaagcccgagttcgaggaggccgacacccccgagaagctgcggaccctgctggccgagaagctgtcctcccggcccgaggccgtgcacgagtacgtgacccccctgttcgtgtcccgggcccccaaccggaagatgtccggcgcccacaaggacaccctgcggtccgccaagcggttcgtgaagcacaacgagaagatctccgtgaagcgggtgtggctgaccgagatcaagctggccgacctggagaacatggtgaactacaagaacggccgggagatcgagctgtacgaggccctgaaggcccggctggaggcctacggcggcaacgccaagcaggccttcgaccccaaggacaaccccttctacaagaagggcggccagctggtgaaggccgtgcgggtggagaagacccaggagtccggcgtgctgctgaacaagaagaacgcctacaccatcgccgacaacggcgacatggtgcgggtggacgtgttctgcaaggtggacaagaagggcaagaaccagtacttcatcgtgcccatctacgcctggcaggtggccgagaacatcctgcccgacatcgactgcaagggctaccggatcgacgactcctacaccttctgcttctccctgcacaagtacgacctgatcgccttccagaaggacgagaagtccaaggtggagttcgcctactacatcaactgcgactcctccaacggccggttctacctggcctggcacgacaagggctccaaggagcagcagttccggatctccacccagaacctggtgctgatccagaagtaccaggtgaacgagctgggcaaggagatccggccctgccggctgaagaagcggccccccgtgcggtccggaaagcggaccgccgacggctccggaggaggaagcccgaagaagaagagaaaggtctag

SEQ ID NO: 57 - protein, 2531 aa, synthetic construct
  REGION 1..2531: note = Synthetic: Cas9-Cas9 fusion -61 amino acid residual linker (mRNA P)-amino acid sequence
MDKKYSIGLDIGTNSVGWAVITDEYKVPSKKFKVLGNTDRHSIKKNLIGALLFDSGETAEATRLKRTARRRYTRRKNRICYLQEIFSNEMAKVDDSFFHRLEESFLVEEDKKHERHPIFGNIVDEVAYHEKYPTIYHLRKKLVDSTDKADLRLIYLALAHMIKFRGHFLIEGDLNPDNSDVDKLFIQLVQTYNQLFEENPINASGVDAKAILSARLSKSRRLENLIAQLPGEKKNGLFGNLIALSLGLTPNFKSNFDLAEDAKLQLSKDTYDDDLDNLLAQIGDQYADLFLAAKNLSDAILLSDILRVNTEITKAPLSASMIKRYDEHHQDLTLLKALVRQQLPEKYKEIFFDQSKNGYAGYIDGGASQEEFYKFIKPILEKMDGTEELLVKLNREDLLRKQRTFDNGSIPHQIHLGELHAILRRQEDFYPFLKDNREKIEKILTFRIPYYVGPLARGNSRFAWMTRKSEETITPWNFEEVVDKGASAQSFIERMTNFDKNLPNEKVLPKHSLLYEYFTVYNELTKVKYVTEGMRKPAFLSGEQKKAIVDLLFKTNRKVTVKQLKEDYFKKIECFDSVEISGVEDRFNASLGTYHDLLKIIKDKDFLDNEENEDILEDIVLTLTLFEDREMIEERLKTYAHLFDDKVMKQLKRRRYTGWGRLSRKLINGIRDKQSGKTILDFLKSDGFANRNFMQLIHDDSLTFKEDIQKAQVSGQGDSLHEHIANLAGSPAIKKGILQTVKVVDELVKVMGRHKPENIVIEMARENQTTQKGQKNSRERMKRIEEGIKELGSQILKEHPVENTQLQNEKLYLYYLQNGRDMYVDQELDINRLSDYDVDHIVPQSFLKDDSIDNKVLTRSDKNRGKSDNVPSEEVVKKMKNYWRQLLNAKLITQRKFDNLTKAERGGLSELDKAGFIKRQLVETRQITKHVAQILDSRMNTKYDENDKLIREVKVITLKSKLVSDFRKDFQFYKVREINNYHHAHDAYLNAVVGTALIKKYPKLESEFVYGDYKVYDVRKMIAKSEQEIGKATAKYFFYSNIMNFFKTEITLANGEIRKRPLIETNGETGEIVWDKGRDFATVRKVLSMPQVNIVKKTEVQTGGFSKESILPKRNSDKLIARKKDWDPKKYGGFDSPTVAYSVLVVAKVEKGKSKKLKSVKELLGITIMERSSFEKNPIDFLEAKGYKEVKKDLIIKLPKYSLFELENGRKRMLASAGELQKGNELALPSKYVNFLYLASHYEKLKGSPEDNEQKQLFVEQHKHYLDEIIEQISEFSKRVILADANLDKVLSAYNKHRDKPIREQAENIIHLFTLTNLGAPAAFKYFDTTIDKKRYTSTKEVLDATLIHQSITGLYETRIDLSQLGGDGAPESATESGGTSTESEGSAGTSTESEGSAGSAGSTSTEEGTSTESEGSAGTSTESEGSSSGAAFKPNPINYILGLDIGIASVGWAMVEIDEEENPIRLIDLGVRVFERAEVPKTGDSLAMARRLARSVRRLTRRRAHRLLRARRLLKREGVLQAADFDENGLIKSLPNTPWQLRAAALDRKLTPLEWSAVLLHLIKHRGYLSQRKNEGETADKELGALLKGVANNAHALQTGDFRTPAELALNKFEKESGHIRNQRGDYSHTFSRKDLQAELILLFEKQKEFGNPHVSGGLKEGIETLLMTQRPALSGDAVQKMLGHCTFEPAEPKAAKNTYTAERFIWLTKLNNLRILEQGSERPLTDTERATLMDEPYRKSKLTYAQARKLLGLEDTAFFKGLRYGKDNAEASTLMEMKAYHAISRALEKEGLKDKKSPLNLSSELQDEIGTAFSLFKTDEDITGRLKDRVQPEILEALLKHISFDKFVQISLKALRRIVPLMEQGKRYDEACAEIYGDHYGKKNTEEKIYLPPIPADEIRNPVVLRALSQARKVINGVVRRYGSPARIHIETAREVGKSFKDRKEIEKRQEENRKDREKAAAKFREYFPNFVGEPKSKDILKLRLYEQQHGKCLYSGKEINLVRLNEKGYVEIDHALPFSRTWDDSFNNKVLVLGSENQNKGNQTPYEYFNGKDNSREWQEFKARVETSRFPRSKKQRILLQKFDEDGFKECNLNDTRYVNRFLCQFVADHILLTGKGKRRVFASNGQITNLLRGFWGLRKVRAENDRHHALDAVVVACSTVAMQQKITRFVRYKEMNAFDGKTIDKETGKVLHQKTHFPQPWEFFAQEVMIRVFGKPDGKPEFEEADTPEKLRTLLAEKLSSRPEAVHEYVTPLFVSRAPNRKMSGAHKDTLRSAKRFVKHNEKISVKRVWLTEIKLADLENMVNYKNGREIELYEALKARLEAYGGNAKQAFDPKDNPFYKKGGQLVKAVRVEKTQESGVLLNKKNAYTIADNGDMVRVDVFCKVDKKGKNQYFIVPIYAWQVAENILPDIDCKGYRIDDSYTFCFSLHKYDLIAFQKDEKSKVEFAYYINCDSSNGRFYLAWHDKGSKEQQFRISTQNLVLIQKYQVNELGKEIRPCRLKKRPPVRSGKRTADGSGGGSPKKKRKV

SEQ ID NO: 58 - RNA, 8183 nt, synthetic construct
  misc_feature 1..8183: note = Synthetic: Cas9-Cas9 fusion -51 amino acid residue linker and HiBit tag (mRNA Q)-mRNA sequence
  source 1..8183: mol_type = other RNA
gggaagctcagaataaacgctcaactttggccggatctgccaccatggacaagaagtactccatcggcctggacatcggcaccaactccgtgggctgggccgtgatcaccgacgagtacaaggtgccctccaagaagttcaaggtgctgggcaacaccgaccggcactccatcaagaagaacctgatcggcgccctgctgttcgactccggcgagaccgccgaggccacccggctgaagcggaccgcccggcggcggtacacccggcggaagaaccggatctgctacctgcaggagatcttctccaacgagatggccaaggtggacgactccttcttccaccggctggaggagtccttcctggtggaggaggacaagaagcacgagcggcaccccatcttcggcaacatcgtggacgaggtggcctaccacgagaagtaccccaccatctaccacctgcggaagaagctggtggactccaccgacaaggccgacctgcggctgatctacctggccctggcccacatgatcaagttccggggccacttcctgatcgagggcgacctgaaccccgacaactccgacgtggacaagctgttcatccagctggtgcagacctacaaccagctgttcgaggagaaccccatcaacgcctccggcgtggacgccaaggccatcctgtccgcccggctgtccaagtcccggcggctggagaacctgatcgcccagctgcccggcgagaagaagaacggcctgttcggcaacctgatcgccctgtccctgggcctgacccccaacttcaagtccaacttcgacctggccgaggacgccaagctgcagctgtccaaggacacctacgacgacgacctggacaacctgctggcccagatcggcgaccagtacgccgacctgttcctggccgccaagaacctgtccgacgccatcctgctgtccgacatcctgcgggtgaacaccgagatcaccaaggcccccctgtccgcctccatgatcaagcggtacgacgagcaccaccaggacctgaccctgctgaaggccctggtgcggcagcagctgcccgagaagtacaaggagatcttcttcgaccagtccaagaacggctacgccggctacatcgacggcggcgcctcccaggaggagttctacaagttcatcaagcccatcctggagaagatggacggcaccgaggagctgctggtgaagctgaaccgggaggacctgctgcggaagcagcggaccttcgacaacggctccatcccccaccagatccacctgggcgagctgcacgccatcctgcggcggcaggaggacttctaccccttcctgaaggacaaccgggagaagatcgagaagatcctgaccttccggatcccctactacgtgggccccctggcccggggcaactcccggttcgcctggatgacccggaagtccgaggagaccatcaccccctggaacttcgaggaggtggtggacaagggcgcctccgcccagtccttcatcgagcggatgaccaacttcgacaagaacctgcccaacgagaaggtgctgcccaagcactccctgctgtacgagtacttcaccgtgtacaacgagctgaccaaggtgaagtacgtgaccgagggcatgcggaagcccgccttcctgtccggcgagcagaagaaggccatcgtggacctgctgttcaagaccaaccggaaggtgaccgtgaagcagctgaaggaggactacttcaagaagatcgagtgcttcgactccgtggagatctccggcgtggaggaccggttcaacgcctccctgggcacctaccacgacctgctgaagatcatcaaggacaaggacttcctggacaacgaggagaacgaggacatcctggaggacatcgtgctgaccctgaccctgttcgaggaccgggagatgatcgaggagcggctgaagacctacgcccacctgttcgacgacaaggtgatgaagcagctgaagcggcggcggtacaccggctggggccggctgtcccggaagctgatcaacggcatccgggacaagcagtccggcaagaccatcctggacttcctgaagtccgacggcttcgccaaccggaacttcatgcagctgatccacgacgactccctgaccttcaaggaggacatccagaaggcccaggtgtccggccagggcgactccctgcacgagcacatcgccaacctggccggctcccccgccatcaagaagggcatcctgcagaccgtgaaggtggtggacgagctggtgaaggtgatgggccggcacaagcccgagaacatcgtgatcgagatggcccgggagaaccagaccacccagaagggccagaagaactcccgggagcggatgaagcggatcgaggagggcatcaaggagctgggctcccagatcctgaaggagcaccccgtggagaacacccagctgcagaacgagaagctgtacctgtactacctgcagaacggccgggacatgtacgtggaccaggagctggacatcaaccggctgtccgactacgacgtggaccacatcgtgccccagtccttcctgaaggacgactccatcgacaacaaggtgctgacccggtccgacaagaaccggggcaagtccgacaacgtgccctccgaggaggtggtgaagaagatgaagaactactggcggcagctgctgaacgccaagctgatcacccagcggaagttcgacaacctgaccaaggccgagcggggcggcctgtccgagctggacaaggccggcttcatcaagcggcagctggtggagacccggcagatcaccaagcacgtggcccagatcctggactcccggatgaacaccaagtacgacgagaacgacaagctgatccgggaggtgaaggtgatcaccctgaagtccaagctggtgtccgacttccggaaggacttccagttctacaaggtgcgggagatcaacaactaccaccacgcccacgacgcctacctgaacgccgtggtgggcaccgccctgatcaagaagtaccccaagctggagtccgagttcgtgtacggcgactacaaggtgtacgacgtgcggaagatgatcgccaagtccgagcaggagatcggcaaggccaccgccaagtacttcttctactccaacatcatgaacttcttcaagaccgagatcaccctggccaacggcgagatccggaagcggcccctgatcgagaccaacggcgagaccggcgagatcgtgtgggacaagggccgggacttcgccaccgtgcggaaggtgctgtccatgccccaggtgaacatcgtgaagaagaccgaggtgcagaccggcggcttctccaaggagtccatcctgcccaagcggaactccgacaagctgatcgcccggaagaaggactgggaccccaagaagtacggcggcttcgactcccccaccgtggcctactccgtgctggtggtggccaaggtggagaagggcaagtccaagaagctgaagtccgtgaaggagctgctgggcatcaccatcatggagcggtcctccttcgagaagaaccccatcgacttcctggaggccaagggctacaaggaggtgaagaaggacctgatcatcaagctgcccaagtactccctgttcgagctggagaacggccggaagcggatgctggcctccgccggcgagctgcagaagggcaacgagctggccctgccctccaagtacgtgaacttcctgtacctggcctcccactacgagaagctgaagggctcccccgaggacaacgagcagaagcagctgttcgtggagcagcacaagcactacctggacgagatcatcgagcagatctccgagttctccaagcgggtgatcctggccgacgccaacctggacaaggtgctgtccgcctacaacaagcaccgggacaagcccatccgggagcaggccgagaacatcatccacctgttcaccctgaccaacctgggcgcccccgccgccttcaagtacttcgacaccaccatcgacaagaagcggtacacctccaccaaggaggtgctggacgccaccctgatccaccagtccatcaccggcctgtacgagacccggatcgacctgtcccagctgggcggcgacggcgcccccgagtccgccaccgagtccggcggcacctccaccgagtccgagggctccgccggcacctccaccgagtccgagggctccgccggctccgccggctccacctccaccgaggagggcacctccaccgagtccgagggctcctcctccggtgccgccttcaagcccaaccccatcaactacatcctgggcctggacatcggcatcgcctccgtgggctgggccatggtggagatcgacgaggaggagaaccccatccggctgatcgacctgggcgtgcgggtgttcgagcgggccgaggtgcccaagaccggcgactccctggccatggcccggcggctggcccggtccgtgcggcggctgacccggcggcgggcccaccggctgctgcgggcccggcggctgctgaagcgggagggcgtgctgcaggccgccgacttcgacgagaacggcctgatcaagtccctgcccaacaccccctggcagctgcgggccgccgccctggaccggaagctgacccccctggagtggtccgccgtgctgctgcacctgatcaagcaccggggctacctgtcccagcggaagaacgagggcgagaccgccgacaaggagctgggcgccctgctgaagggcgtggccaacaacgcccacgccctgcagaccggcgacttccggacccccgccgagctggccctgaacaagttcgagaaggagtccggccacatccggaaccagcggggcgactactcccacaccttctcccggaaggacctgcaggccgagctgatcctgctgttcgagaagcagaaggagttcggcaacccccacgtgtccggcggcctgaaggagggcatcgagaccctgctgatgacccagcggcccgccctgtccggcgacgccgtgcagaagatgctgggccactgcaccttcgagcccgccgagcccaaggccgccaagaacacctacaccgccgagcggttcatctggctgaccaagctgaacaacctgcggatcctggagcagggctccgagcggcccctgaccgacaccgagcgggccaccctgatggacgagccctaccggaagtccaagctgacctacgcccaggcccggaagctgctgggcctggaggacaccgccttcttcaagggcctgcggtacggcaaggacaacgccgaggcctccaccctgatggagatgaaggcctaccacgccatctcccgggccctggagaaggagggcctgaaggacaagaagtcccccctgaacctgtcctccgagctgcaggacgagatcggcaccgccttctccctgttcaagaccgacgaggacatcaccggccggctgaaggaccgggtgcagcccgagatcctggaggccctgctgaagcacatctccttcgacaagttcgtgcagatctccctgaaggccctgcggcggatcgtgcccctgatggagcagggcaagcggtacgacgaggcctgcgccgagatctacggcgaccactacggcaagaagaacaccgaggagaagatctacctgccccccatccccgccgacgagatccggaaccccgtggtgctgcgggccctgtcccaggcccggaaggtgatcaacggcgtggtgcggcggtacggctcccccgcccggatccacatcgagaccgcccgggaggtgggcaagtccttcaaggaccggaaggagatcgagaagcggcaggaggagaaccggaaggaccgggagaaggccgccgccaagttccgggagtacttccccaacttcgtgggcgagcccaagtccaaggacatcctgaagctgcggctgtacgagcagcagcacggcaagtgcctgtactccggcaaggagatcaacctggtgcggctgaacgagaagggctacgtggagatcgaccacgccctgcccttctcccggacctgggacgactccttcaacaacaaggtgctggtgctgggctccgagaaccagaacaagggcaaccagaccccctacgagtacttcaacggcaaggacaactcccgggagtggcaggagttcaaggcccgggtggagacctcccggttcccccggtccaagaagcagcggatcctgctgcagaagttcgacgaggacggcttcaaggagtgcaacctgaacgacacccggtacgtgaaccgcttcctgtgccagttcgtggccgaccacatcctgctgaccggcaagggcaagcggcgggtgttcgcctccaacggccagatcaccaacctgctgcggggcttctggggcctgcggaaggtgcgggccgagaacgaccggcaccacgccctggacgccgtggtggtggcctgctccaccgtggccatgcagcagaagatcacccggttcgtgcggtacaaggagatgaacgccttcgacggcaagaccatcgacaaggagaccggcaaggtgctgcaccagaagacccacttcccccagccctgggagttcttcgcccaggaggtgatgatccgggtgttcggcaagcccgacggcaagcccgagttcgaggaggccgacacccccgagaagctgcggaccctgctggccgagaagctgtcctcccggcccgaggccgtgcacgagtacgtgacccccctgttcgtgtcccgggcccccaaccggaagatgtccggcgcccacaaggacaccctgcggtccgccaagcggttcgtgaagcacaacgagaagatctccgtgaagcgggtgtggctgaccgagatcaagctggccgacctggagaacatggtgaactacaagaacggccgggagatcgagctgtacgaggccctgaaggcccggctggaggcctacggcggcaacgccaagcaggccttcgaccccaaggacaaccccttctacaagaagggcggccagctggtgaaggccgtgcgggtggagaagacccaggagtccggcgtgctgctgaacaagaagaacgcctacaccatcgccgacaacggcgacatggtgcgggtggacgtgttctgcaaggtggacaagaagggcaagaaccagtacttcatcgtgcccatctacgcctggcaggtggccgagaacatcctgcccgacatcgactgcaagggctaccggatcgacgactcctacaccttctgcttctccctgcacaagtacgacctgatcgccttccagaaggacgagaagtccaaggtggagttcgcctactacatcaactgcgactcctccaacggccggttctacctggcctggcacgacaagggctccaaggagcagcagttccggatctccacccagaacctggtgctgatccagaagtaccaggtgaacgagctgggcaaggagatccggccctgccggctgaagaagcggccccccgtgcggtccggaaagcggaccgccgacggctccggaggaggaagcccgaagaagaagagaaaggtcagcgaaagcgcaacaccggaaagcgtcagcggatggagactgttcaagaagatcagctagctagcaccagcctcaagaacacccgaatggagtctctaagctacataataccaacttacactttacaaaatgttgtcccccaaaatgtagccattcgtatctgctcctaataaaaagaaagtttcttcacattctctcgagaaaaaaaaaaaatggaaaaaaaaaaaacggaaaaaaaaaaaaggtaaaaaaaaaaaatataaaaaaaaaaaacataaaaaaaaaaaacgaaaaaaaaaaaacgtaaaaaaaaaaaactcaaaaaaaaaaaagataaaaaaaaaaaacctaaaaaaaaaaaatgtaaaaaaaaaaaagggaaaaaaaaaaaacgcaaaaaaaaaaaacacaaaaaaaaaaaatgcaaaaaaaaaaaatcgaaaaaaaaaaaatctaaaaaaaaaaaacgaaaaaaaaaaaacccaaaaaaaaaaaagacaaaaaaaaaaaatagaaaaaaaaaaaagttaaaaaaaaaaaactgaaaaaaaaaaaatttaaaaaaaaaaaatctag

SEQ ID NO: 59 - RNA, 7623 nt, synthetic construct
  misc_feature 1..7623: note = Synthetic: Cas9-Cas9 fusion -51 amino acid residue linker and HiBit tag (mRNA Q)-ORF sequence
  source 1..7623: mol_type = other RNA
atggacaagaagtactccatcggcctggacatcggcaccaactccgtgggctgggccgtgatcaccgacgagtacaaggtgccctccaagaagttcaaggtgctgggcaacaccgaccggcactccatcaagaagaacctgatcggcgccctgctgttcgactccggcgagaccgccgaggccacccggctgaagcggaccgcccggcggcggtacacccggcggaagaaccggatctgctacctgcaggagatcttctccaacgagatggccaaggtggacgactccttcttccaccggctggaggagtccttcctggtggaggaggacaagaagcacgagcggcaccccatcttcggcaacatcgtggacgaggtggcctaccacgagaagtaccccaccatctaccacctgcggaagaagctggtggactccaccgacaaggccgacctgcggctgatctacctggccctggcccacatgatcaagttccggggccacttcctgatcgagggcgacctgaaccccgacaactccgacgtggacaagctgttcatccagctggtgcagacctacaaccagctgttcgaggagaaccccatcaacgcctccggcgtggacgccaaggccatcctgtccgcccggctgtccaagtcccggcggctggagaacctgatcgcccagctgcccggcgagaagaagaacggcctgttcggcaacctgatcgccctgtccctgggcctgacccccaacttcaagtccaacttcgacctggccgaggacgccaagctgcagctgtccaaggacacctacgacgacgacctggacaacctgctggcccagatcggcgaccagtacgccgacctgttcctggccgccaagaacctgtccgacgccatcctgctgtccgacatcctgcgggtgaacaccgagatcaccaaggcccccctgtccgcctccatgatcaagcggtacgacgagcaccaccaggacctgaccctgctgaaggccctggtgcggcagcagctgcccgagaagtacaaggagatcttcttcgaccagtccaagaacggctacgccggctacatcgacggcggcgcctcccaggaggagttctacaagttcatcaagcccatcctggagaagatggacggcaccgaggagctgctggtgaagctgaaccgggaggacctgctgcggaagcagcggaccttcgacaacggctccatcccccaccagatccacctgggcgagctgcacgccatcctgcggcggcaggaggacttctaccccttcctgaaggacaaccgggagaagatcgagaagatcctgaccttccggatcccctactacgtgggccccctggcccggggcaactcccggttcgcctggatgacccggaagtccgaggagaccatcaccccctggaacttcgaggaggtggtggacaagggcgcctccgcccagtccttcatcgagcggatgaccaacttcgacaagaacctgcccaacgagaaggtgctgcccaagcactccctgctgtacgagtacttcaccgtgtacaacgagctgaccaaggtgaagtacgtgaccgagggcatgcggaagcccgccttcctgtccggcgagcagaagaaggccatcgtggacctgctgttcaagaccaaccggaaggtgaccgtgaagcagctgaaggaggactacttcaagaagatcgagtgcttcgactccgtggagatctccggcgtggaggaccggttcaacgcctccctgggcacctaccacgacctgctgaagatcatcaaggacaaggacttcctggacaacgaggagaacgaggacatcctggaggacatcgtgctgaccctgaccctgttcgaggaccgggagatgatcgaggagcggctgaagacctacgcccacctgttcgacgacaaggtgatgaagcagctgaagcggcggcggtacaccggctggggccggctgtcccggaagctgatcaacggcatccgggacaagcagtccggcaagaccatcctggacttcctgaagtccgacggcttcgccaaccggaacttcatgcagctgatccacgacgactccctgaccttcaaggaggacatccagaaggcccaggtgtccggccagggcgactccctgcacgagcacatcgccaacctggccggctcccccgccatcaagaagggcatcctgcagaccgtgaaggtggtggacgagctggtgaaggtgatgggccggcacaagcccgagaacatcgtgatcgagatggcccgggagaaccagaccacccagaagggccagaagaactcccgggagcggatgaagcggatcgaggagggcatcaaggagctgggctcccagatcctgaaggagcaccccgtggagaacacccagctgcagaacgagaagctgtacctgtactacctgcagaacggccgggacatgtacgtggaccaggagctggacatcaaccggctgtccgactacgacgtggaccacatcgtgccccagtccttcctgaaggacgactccatcgacaacaaggtgctgacccggtccgacaagaaccggggcaagtccgacaacgtgccctccgaggaggtggtgaagaagatgaagaactactggcggcagctgctgaacgccaagctgatcacccagcggaagttcgacaacctgaccaaggccgagcggggcggcctgtccgagctggacaaggccggcttcatcaagcggcagctggtggagacccggcagatcaccaagcacgtggcccagatcctggactcccggatgaacaccaagtacgacgagaacgacaagctgatccgggaggtgaaggtgatcaccctgaagtccaagctggtgtccgacttccggaaggacttccagttctacaaggtgcgggagatcaacaactaccaccacgcccacgacgcctacctgaacgccgtggtgggcaccgccctgatcaagaagtaccccaagctggagtccgagttcgtgtacggcgactacaaggtgtacgacgtgcggaagatgatcgccaagtccgagcaggagatcggcaaggccaccgccaagtacttcttctactccaacatcatgaacttcttcaagaccgagatcaccctggccaacggcgagatccggaagcggcccctgatcgagaccaacggcgagaccggcgagatcgtgtgggacaagggccgggacttcgccaccgtgcggaaggtgctgtccatgccccaggtgaacatcgtgaagaagaccgaggtgcagaccggcggcttctccaaggagtccatcctgcccaagcggaactccgacaagctgatcgcccggaagaaggactgggaccccaagaagtacggcggcttcgactcccccaccgtggcctactccgtgctggtggtggccaaggtggagaagggcaagtccaagaagctgaagtccgtgaaggagctgctgggcatcaccatcatggagcggtcctccttcgagaagaaccccatcgacttcctggaggccaagggctacaaggaggtgaagaaggacctgatcatcaagctgcccaagtactccctgttcgagctggagaacggccggaagcggatgctggcctccgccggcgagctgcagaagggcaacgagctggccctgccctccaagtacgtgaacttcctgtacctggcctcccactacgagaagctgaagggctcccccgaggacaacgagcagaagcagctgttcgtggagcagcacaagcactacctggacgagatcatcgagcagatctccgagttctccaagcgggtgatcctggccgacgccaacctggacaaggtgctgtccgcctacaacaagcaccgggacaagcccatccgggagcaggccgagaacatcatccacctgttcaccctgaccaacctgggcgcccccgccgccttcaagtacttcgacaccaccatcgacaagaagcggtacacctccaccaaggaggtgctggacgccaccctgatccaccagtccatcaccggcctgtacgagacccggatcgacctgtcccagctgggcggcgacggcgcccccgagtccgccaccgagtccggcggcacctccaccgagtccgagggctccgccggcacctccaccgagtccgagggctccgccggctccgccggctccacctccaccgaggagggcacctccaccgagtccgagggctcctcctccggtgccgccttcaagcccaaccccatcaactacatcctgggcctggacatcggcatcgcctccgtgggctgggccatggtggagatcgacgaggaggagaaccccatccggctgatcgacctgggcgtgcgggtgttcgagcgggccgaggtgcccaagaccggcgactccctggccatggcccggcggctggcccggtccgtgcggcggctgacccggcggcgggcccaccggctgctgcgggcccggcggctgctgaagcgggagggcgtgctgcaggccgccgacttcgacgagaacggcctgatcaagtccctgcccaacaccccctggcagctgcgggccgccgccctggaccggaagctgacccccctggagtggtccgccgtgctgctgcacctgatcaagcaccggggctacctgtcccagcggaagaacgagggcgagaccgccgacaaggagctgggcgccctgctgaagggcgtggccaacaacgcccacgccctgcagaccggcgacttccggacccccgccgagctggccctgaacaagttcgagaaggagtccggccacatccggaaccagcggggcgactactcccacaccttctcccggaaggacctgcaggccgagctgatcctgctgttcgagaagcagaaggagttcggcaacccccacgtgtccggcggcctgaaggagggcatcgagaccctgctgatgacccagcggcccgccctgtccggcgacgccgtgcagaagatgctgggccactgcaccttcgagcccgccgagcccaaggccgccaagaacacctacaccgccgagcggttcatctggctgaccaagctgaacaacctgcggatcctggagcagggctccgagcggcccctgaccgacaccgagcgggccaccctgatggacgagccctaccggaagtccaagctgacctacgcccaggcccggaagctgctgggcctggaggacaccgccttcttcaagggcctgcggtacggcaaggacaacgccgaggcctccaccctgatggagatgaaggcctaccacgccatctcccgggccctggagaaggagggcctgaaggacaagaagtcccccctgaacctgtcctccgagctgcaggacgagatcggcaccgccttctccctgttcaagaccgacgaggacatcaccggccggctgaaggaccgggtgcagcccgagatcctggaggccctgctgaagcacatctccttcgacaagttcgtgcagatctccctgaaggccctgcggcggatcgtgcccctgatggagcagggcaagcggtacgacgaggcctgcgccgagatctacggcgaccactacggcaagaagaacaccgaggagaagatctacctgccccccatccccgccgacgagatccggaaccccgtggtgctgcgggccctgtcccaggcccggaaggtgatcaacggcgtggtgcggcggtacggctcccccgcccggatccacatcgagaccgcccgggaggtgggcaagtccttcaaggaccggaaggagatcgagaagcggcaggaggagaaccggaaggaccgggagaaggccgccgccaagttccgggagtacttccccaacttcgtgggcgagcccaagtccaaggacatcctgaagctgcggctgtacgagcagcagcacggcaagtgcctgtactccggcaaggagatcaacctggtgcggctgaacgagaagggctacgtggagatcgaccacgccctgcccttctcccggacctgggacgactccttcaacaacaaggtgctggtgctgggctccgagaaccagaacaagggcaaccagaccccctacgagtacttcaacggcaaggacaactcccgggagtggcaggagttcaaggcccgggtggagacctcccggttcccccggtccaagaagcagcggatcctgctgcagaagttcgacgaggacggcttcaaggagtgcaacctgaacgacacccggtacgtgaaccgcttcctgtgccagttcgtggccgaccacatcctgctgaccggcaagggcaagcggcgggtgttcgcctccaacggccagatcaccaacctgctgcggggcttctggggcctgcggaaggtgcgggccgagaacgaccggcaccacgccctggacgccgtggtggtggcctgctccaccgtggccatgcagcagaagatcacccggttcgtgcggtacaaggagatgaacgccttcgacggcaagaccatcgacaaggagaccggcaaggtgctgcaccagaagacccacttcccccagccctgggagttcttcgcccaggaggtgatgatccgggtgttcggcaagcccgacggcaagcccgagttcgaggaggccgacacccccgagaagctgcggaccctgctggccgagaagctgtcctcccggcccgaggccgtgcacgagtacgtgacccccctgttcgtgtcccgggcccccaaccggaagatgtccggcgcccacaaggacaccctgcggtccgccaagcggttcgtgaagcacaacgagaagatctccgtgaagcgggtgtggctgaccgagatcaagctggccgacctggagaacatggtgaactacaagaacggccgggagatcgagctgtacgaggccctgaaggcccggctggaggcctacggcggcaacgccaagcaggccttcgaccccaaggacaaccccttctacaagaagggcggccagctggtgaaggccgtgcgggtggagaagacccaggagtccggcgtgctgctgaacaagaagaacgcctacaccatcgccgacaacggcgacatggtgcgggtggacgtgttctgcaaggtggacaagaagggcaagaaccagtacttcatcgtgcccatctacgcctggcaggtggccgagaacatcctgcccgacatcgactgcaagggctaccggatcgacgactcctacaccttctgcttctccctgcacaagtacgacctgatcgccttccagaaggacgagaagtccaaggtggagttcgcctactacatcaactgcgactcctccaacggccggttctacctggcctggcacgacaagggctccaaggagcagcagttccggatctccacccagaacctggtgctgatccagaagtaccaggtgaacgagctgggcaaggagatccggccctgccggctgaagaagcggccccccgtgcggtccggaaagcggaccgccgacggctccggaggaggaagcccgaagaagaagagaaaggtcagcgaaagcgcaacaccggaaagcgtcagcggatggagactgttcaagaagatcagctag

SEQ ID NO: 60 - protein, 2540 aa, synthetic construct
  REGION 1..2540: note = Synthetic: Cas9-Cas9 fusion -51 amino acid residue linker and HiBit tag (mRNA Q)-amino acid sequence
MDKKYSIGLDIGTNSVGWAVITDEYKVPSKKFKVLGNTDRHSIKKNLIGALLFDSGETAEATRLKRTARRRYTRRKNRICYLQEIFSNEMAKVDDSFFHRLEESFLVEEDKKHERHPIFGNIVDEVAYHEKYPTIYHLRKKLVDSTDKADLRLIYLALAHMIKFRGHFLIEGDLNPDNSDVDKLFIQLVQTYNQLFEENPINASGVDAKAILSARLSKSRRLENLIAQLPGEKKNGLFGNLIALSLGLTPNFKSNFDLAEDAKLQLSKDTYDDDLDNLLAQIGDQYADLFLAAKNLSDAILLSDILRVNTEITKAPLSASMIKRYDEHHQDLTLLKALVRQQLPEKYKEIFFDQSKNGYAGYIDGGASQEEFYKFIKPILEKMDGTEELLVKLNREDLLRKQRTFDNGSIPHQIHLGELHAILRRQEDFYPFLKDNREKIEKILTFRIPYYVGPLARGNSRFAWMTRKSEETITPWNFEEVVDKGASAQSFIERMTNFDKNLPNEKVLPKHSLLYEYFTVYNELTKVKYVTEGMRKPAFLSGEQKKAIVDLLFKTNRKVTVKQLKEDYFKKIECFDSVEISGVEDRFNASLGTYHDLLKIIKDKDFLDNEENEDILEDIVLTLTLFEDREMIEERLKTYAHLFDDKVMKQLKRRRYTGWGRLSRKLINGIRDKQSGKTILDFLKSDGFANRNFMQLIHDDSLTFKEDIQKAQVSGQGDSLHEHIANLAGSPAIKKGILQTVKVVDELVKVMGRHKPENIVIEMARENQTTQKGQKNSRERMKRIEEGIKELGSQILKEHPVENTQLQNEKLYLYYLQNGRDMYVDQELDINRLSDYDVDHIVPQSFLKDDSIDNKVLTRSDKNRGKSDNVPSEEVVKKMKNYWRQLLNAKLITQRKFDNLTKAERGGLSELDKAGFIKRQLVETRQITKHVAQILDSRMNTKYDENDKLIREVKVITLKSKLVSDFRKDFQFYKVREINNYHHAHDAYLNAVVGTALIKKYPKLESEFVYGDYKVYDVRKMIAKSEQEIGKATAKYFFYSNIMNFFKTEITLANGEIRKRPLIETNGETGEIVWDKGRDFATVRKVLSMPQVNIVKKTEVQTGGFSKESILPKRNSDKLIARKKDWDPKKYGGFDSPTVAYSVLVVAKVEKGKSKKLKSVKELLGITIMERSSFEKNPIDFLEAKGYKEVKKDLIIKLPKYSLFELENGRKRMLASAGELQKGNELALPSKYVNFLYLASHYEKLKGSPEDNEQKQLFVEQHKHYLDEIIEQISEFSKRVILADANLDKVLSAYNKHRDKPIREQAENIIHLFTLTNLGAPAAFKYFDTTIDKKRYTSTKEVLDATLIHQSITGLYETRIDLSQLGGDGAPESATESGGTSTESEGSAGTSTESEGSAGSAGSTSTEEGTSTESEGSSSGAAFKPNPINYILGLDIGIASVGWAMVEIDEEENPIRLIDLGVRVFERAEVPKTGDSLAMARRLARSVRRLTRRRAHRLLRARRLLKREGVLQAADFDENGLIKSLPNTPWQLRAAALDRKLTPLEWSAVLLHLIKHRGYLSQRKNEGETADKELGALLKGVANNAHALQTGDFRTPAELALNKFEKESGHIRNQRGDYSHTFSRKDLQAELILLFEKQKEFGNPHVSGGLKEGIETLLMTQRPALSGDAVQKMLGHCTFEPAEPKAAKNTYTAERFIWLTKLNNLRILEQGSERPLTDTERATLMDEPYRKSKLTYAQARKLLGLEDTAFFKGLRYGKDNAEASTLMEMKAYHAISRALEKEGLKDKKSPLNLSSELQDEIGTAFSLFKTDEDITGRLKDRVQPEILEALLKHISFDKFVQISLKALRRIVPLMEQGKRYDEACAEIYGDHYGKKNTEEKIYLPPIPADEIRNPVVLRALSQARKVINGVVRRYGSPARIHIETAREVGKSFKDRKEIEKRQEENRKDREKAAAKFREYFPNFVGEPKSKDILKLRLYEQQHGKCLYSGKEINLVRLNEKGYVEIDHALPFSRTWDDSFNNKVLVLGSENQNKGNQTPYEYFNGKDNSREWQEFKARVETSRFPRSKKQRILLQKFDEDGFKECNLNDTRYVNRFLCQFVADHILLTGKGKRRVFASNGQITNLLRGFWGLRKVRAENDRHHALDAVVVACSTVAMQQKITRFVRYKEMNAFDGKTIDKETGKVLHQKTHFPQPWEFFAQEVMIRVFGKPDGKPEFEEADTPEKLRTLLAEKLSSRPEAVHEYVTPLFVSRAPNRKMSGAHKDTLRSAKRFVKHNEKISVKRVWLTEIKLADLENMVNYKNGREIELYEALKARLEAYGGNAKQAFDPKDNPFYKKGGQLVKAVRVEKTQESGVLLNKKNAYTIADNGDMVRVDVFCKVDKKGKNQYFIVPIYAWQVAENILPDIDCKGYRIDDSYTFCFSLHKYDLIAFQKDEKSKVEFAYYINCDSSNGRFYLAWHDKGSKEQQFRISTQNLVLIQKYQVNELGKEIRPCRLKKRPPVRSGKRTADGSGGGSPKKKRKVSESATPESVSGWRLFKKIS

SEQ ID NO: 61 - RNA, 7566 nt, synthetic construct
  misc_feature 1..7566: note = Synthetic: Cas9-Cas9 fusion -51 amino acid residual linker (mRNA Q)-mRNA sequence
  source 1..7566: mol_type = other RNA
atggacaagaagtactccatcggcctggacatcggcaccaactccgtgggctgggccgtgatcaccgacgagtacaaggtgccctccaagaagttcaaggtgctgggcaacaccgaccggcactccatcaagaagaacctgatcggcgccctgctgttcgactccggcgagaccgccgaggccacccggctgaagcggaccgcccggcggcggtacacccggcggaagaaccggatctgctacctgcaggagatcttctccaacgagatggccaaggtggacgactccttcttccaccggctggaggagtccttcctggtggaggaggacaagaagcacgagcggcaccccatcttcggcaacatcgtggacgaggtggcctaccacgagaagtaccccaccatctaccacctgcggaagaagctggtggactccaccgacaaggccgacctgcggctgatctacctggccctggcccacatgatcaagttccggggccacttcctgatcgagggcgacctgaaccccgacaactccgacgtggacaagctgttcatccagctggtgcagacctacaaccagctgttcgaggagaaccccatcaacgcctccggcgtggacgccaaggccatcctgtccgcccggctgtccaagtcccggcggctggagaacctgatcgcccagctgcccggcgagaagaagaacggcctgttcggcaacctgatcgccctgtccctgggcctgacccccaacttcaagtccaacttcgacctggccgaggacgccaagctgcagctgtccaaggacacctacgacgacgacctggacaacctgctggcccagatcggcgaccagtacgccgacctgttcctggccgccaagaacctgtccgacgccatcctgctgtccgacatcctgcgggtgaacaccgagatcaccaaggcccccctgtccgcctccatgatcaagcggtacgacgagcaccaccaggacctgaccctgctgaaggccctggtgcggcagcagctgcccgagaagtacaaggagatcttcttcgaccagtccaagaacggctacgccggctacatcgacggcggcgcctcccaggaggagttctacaagttcatcaagcccatcctggagaagatggacggcaccgaggagctgctggtgaagctgaaccgggaggacctgctgcggaagcagcggaccttcgacaacggctccatcccccaccagatccacctgggcgagctgcacgccatcctgcggcggcaggaggacttctaccccttcctgaaggacaaccgggagaagatcgagaagatcctgaccttccggatcccctactacgtgggccccctggcccggggcaactcccggttcgcctggatgacccggaagtccgaggagaccatcaccccctggaacttcgaggaggtggtggacaagggcgcctccgcccagtccttcatcgagcggatgaccaacttcgacaagaacctgcccaacgagaaggtgctgcccaagcactccctgctgtacgagtacttcaccgtgtacaacgagctgaccaaggtgaagtacgtgaccgagggcatgcggaagcccgccttcctgtccggcgagcagaagaaggccatcgtggacctgctgttcaagaccaaccggaaggtgaccgtgaagcagctgaaggaggactacttcaagaagatcgagtgcttcgactccgtggagatctccggcgtggaggaccggttcaacgcctccctgggcacctaccacgacctgctgaagatcatcaaggacaaggacttcctggacaacgaggagaacgaggacatcctggaggacatcgtgctgaccctgaccctgttcgaggaccgggagatgatcgaggagcggctgaagacctacgcccacctgttcgacgacaaggtgatgaagcagctgaagcggcggcggtacaccggctggggccggctgtcccggaagctgatcaacggcatccgggacaagcagtccggcaagaccatcctggacttcctgaagtccgacggcttcgccaaccggaacttcatgcagctgatccacgacgactccctgaccttcaaggaggacatccagaaggcccaggtgtccggccagggcgactccctgcacgagcacatcgccaacctggccggctcccccgccatcaagaagggcatcctgcagaccgtgaaggtggtggacgagctggtgaaggtgatgggccggcacaagcccgagaacatcgtgatcgagatggcccgggagaaccagaccacccagaagggccagaagaactcccgggagcggatgaagcggatcgaggagggcatcaaggagctgggctcccagatcctgaaggagcaccccgtggagaacacccagctgcagaacgagaagctgtacctgtactacctgcagaacggccgggacatgtacgtggaccaggagctggacatcaaccggctgtccgactacgacgtggaccacatcgtgccccagtccttcctgaaggacgactccatcgacaacaaggtgctgacccggtccgacaagaaccggggcaagtccgacaacgtgccctccgaggaggtggtgaagaagatgaagaactactggcggcagctgctgaacgccaagctgatcacccagcggaagttcgacaacctgaccaaggccgagcggggcggcctgtccgagctggacaaggccggcttcatcaagcggcagctggtggagacccggcagatcaccaagcacgtggcccagatcctggactcccggatgaacaccaagtacgacgagaacgacaagctgatccgggaggtgaaggtgatcaccctgaagtccaagctggtgtccgacttccggaaggacttccagttctacaaggtgcgggagatcaacaactaccaccacgcccacgacgcctacctgaacgccgtggtgggcaccgccctgatcaagaagtaccccaagctggagtccgagttcgtgtacggcgactacaaggtgtacgacgtgcggaagatgatcgccaagtccgagcaggagatcggcaaggccaccgccaagtacttcttctactccaacatcatgaacttcttcaagaccgagatcaccctggccaacggcgagatccggaagcggcccctgatcgagaccaacggcgagaccggcgagatcgtgtgggacaagggccgggacttcgccaccgtgcggaaggtgctgtccatgccccaggtgaacatcgtgaagaagaccgaggtgcagaccggcggcttctccaaggagtccatcctgcccaagcggaactccgacaagctgatcgcccggaagaaggactgggaccccaagaagtacggcggcttcgactcccccaccgtggcctactccgtgctggtggtggccaaggtggagaagggcaagtccaagaagctgaagtccgtgaaggagctgctgggcatcaccatcatggagcggtcctccttcgagaagaaccccatcgacttcctggaggccaagggctacaaggaggtgaagaaggacctgatcatcaagctgcccaagtactccctgttcgagctggagaacggccggaagcggatgctggcctccgccggcgagctgcagaagggcaacgagctggccctgccctccaagtacgtgaacttcctgtacctggcctcccactacgagaagctgaagggctcccccgaggacaacgagcagaagcagctgttcgtggagcagcacaagcactacctggacgagatcatcgagcagatctccgagttctccaagcgggtgatcctggccgacgccaacctggacaaggtgctgtccgcctacaacaagcaccgggacaagcccatccgggagcaggccgagaacatcatccacctgttcaccctgaccaacctgggcgcccccgccgccttcaagtacttcgacaccaccatcgacaagaagcggtacacctccaccaaggaggtgctggacgccaccctgatccaccagtccatcaccggcctgtacgagacccggatcgacctgtcccagctgggcggcgacggcgcccccgagtccgccaccgagtccggcggcacctccaccgagtccgagggctccgccggcacctccaccgagtccgagggctccgccggctccgccggctccacctccaccgaggagggcacctccaccgagtccgagggctcctcctccggtgccgccttcaagcccaaccccatcaactacatcctgggcctggacatcggcatcgcctccgtgggctgggccatggtggagatcgacgaggaggagaaccccatccggctgatcgacctgggcgtgcgggtgttcgagcgggccgaggtgcccaagaccggcgactccctggccatggcccggcggctggcccggtccgtgcggcggctgacccggcggcgggcccaccggctgctgcgggcccggcggctgctgaagcgggagggcgtgctgcaggccgccgacttcgacgagaacggcctgatcaagtccctgcccaacaccccctggcagctgcgggccgccgccctggaccggaagctgacccccctggagtggtccgccgtgctgctgcacctgatcaagcaccggggctacctgtcccagcggaagaacgagggcgagaccgccgacaaggagctgggcgccctgctgaagggcgtggccaacaacgcccacgccctgcagaccggcgacttccggacccccgccgagctggccctgaacaagttcgagaaggagtccggccacatccggaaccagcggggcgactactcccacaccttctcccggaaggacctgcaggccgagctgatcctgctgttcgagaagcagaaggagttcggcaacccccacgtgtccggcggcctgaaggagggcatcgagaccctgctgatgacccagcggcccgccctgtccggcgacgccgtgcagaagatgctgggccactgcaccttcgagcccgccgagcccaaggccgccaagaacacctacaccgccgagcggttcatctggctgaccaagctgaacaacctgcggatcctggagcagggctccgagcggcccctgaccgacaccgagcgggccaccctgatggacgagccctaccggaagtccaagctgacctacgcccaggcccggaagctgctgggcctggaggacaccgccttcttcaagggcctgcggtacggcaaggacaacgccgaggcctccaccctgatggagatgaaggcctaccacgccatctcccgggccctggagaaggagggcctgaaggacaagaagtcccccctgaacctgtcctccgagctgcaggacgagatcggcaccgccttctccctgttcaagaccgacgaggacatcaccggccggctgaaggaccgggtgcagcccgagatcctggaggccctgctgaagcacatctccttcgacaagttcgtgcagatctccctgaaggccctgcggcggatcgtgcccctgatggagcagggcaagcggtacgacgaggcctgcgccgagatctacggcgaccactacggcaagaagaacaccgaggagaagatctacctgccccccatccccgccgacgagatccggaaccccgtggtgctgcgggccctgtcccaggcccggaaggtgatcaacggcgtggtgcggcggtacggctcccccgcccggatccacatcgagaccgcccgggaggtgggcaagtccttcaaggaccggaaggagatcgagaagcggcaggaggagaaccggaaggaccgggagaaggccgccgccaagttccgggagtacttccccaacttcgtgggcgagcccaagtccaaggacatcctgaagctgcggctgtacgagcagcagcacggcaagtgcctgtactccggcaaggagatcaacctggtgcggctgaacgagaagggctacgtggagatcgaccacgccctgcccttctcccggacctgggacgactccttcaacaacaaggtgctggtgctgggctccgagaaccagaacaagggcaaccagaccccctacgagtacttcaacggcaaggacaactcccgggagtggcaggagttcaaggcccgggtggagacctcccggttcccccggtccaagaagcagcggatcctgctgcagaagttcgacgaggacggcttcaaggagtgcaacctgaacgacacccggtacgtgaaccgcttcctgtgccagttcgtggccgaccacatcctgctgaccggcaagggcaagcggcgggtgttcgcctccaacggccagatcaccaacctgctgcggggcttctggggcctgcggaaggtgcgggccgagaacgaccggcaccacgccctggacgccgtggtggtggcctgctccaccgtggccatgcagcagaagatcacccggttcgtgcggtacaaggagatgaacgccttcgacggcaagaccatcgacaaggagaccggcaaggtgctgcaccagaagacccacttcccccagccctgggagttcttcgcccaggaggtgatgatccgggtgttcggcaagcccgacggcaagcccgagttcgaggaggccgacacccccgagaagctgcggaccctgctggccgagaagctgtcctcccggcccgaggccgtgcacgagtacgtgacccccctgttcgtgtcccgggcccccaaccggaagatgtccggcgcccacaaggacaccctgcggtccgccaagcggttcgtgaagcacaacgagaagatctccgtgaagcgggtgtggctgaccgagatcaagctggccgacctggagaacatggtgaactacaagaacggccgggagatcgagctgtacgaggccctgaaggcccggctggaggcctacggcggcaacgccaagcaggccttcgaccccaaggacaaccccttctacaagaagggcggccagctggtgaaggccgtgcgggtggagaagacccaggagtccggcgtgctgctgaacaagaagaacgcctacaccatcgccgacaacggcgacatggtgcgggtggacgtgttctgcaaggtggacaagaagggcaagaaccagtacttcatcgtgcccatctacgcctggcaggtggccgagaacatcctgcccgacatcgactgcaagggctaccggatcgacgactcctacaccttctgcttctccctgcacaagtacgacctgatcgccttccagaaggacgagaagtccaaggtggagttcgcctactacatcaactgcgactcctccaacggccggttctacctggcctggcacgacaagggctccaaggagcagcagttccggatctccacccagaacctggtgctgatccagaagtaccaggtgaacgagctgggcaaggagatccggccctgccggctgaagaagcggccccccgtgcggtccggaaagcggaccgccgacggctccggaggaggaagcccgaagaagaagagaaaggtctag

SEQ ID NO: 62 - protein, 2521 aa, synthetic construct
  REGION 1..2521: note = Synthetic: Cas9-Cas9 fusion -51 amino acid residual linker (mRNA Q)- amino acid sequence
MDKKYSIGLDIGTNSVGWAVITDEYKVPSKKFKVLGNTDRHSIKKNLIGALLFDSGETAEATRLKRTARRRYTRRKNRICYLQEIFSNEMAKVDDSFFHRLEESFLVEEDKKHERHPIFGNIVDEVAYHEKYPTIYHLRKKLVDSTDKADLRLIYLALAHMIKFRGHFLIEGDLNPDNSDVDKLFIQLVQTYNQLFEENPINASGVDAKAILSARLSKSRRLENLIAQLPGEKKNGLFGNLIALSLGLTPNFKSNFDLAEDAKLQLSKDTYDDDLDNLLAQIGDQYADLFLAAKNLSDAILLSDILRVNTEITKAPLSASMIKRYDEHHQDLTLLKALVRQQLPEKYKEIFFDQSKNGYAGYIDGGASQEEFYKFIKPILEKMDGTEELLVKLNREDLLRKQRTFDNGSIPHQIHLGELHAILRRQEDFYPFLKDNREKIEKILTFRIPYYVGPLARGNSRFAWMTRKSEETITPWNFEEVVDKGASAQSFIERMTNFDKNLPNEKVLPKHSLLYEYFTVYNELTKVKYVTEGMRKPAFLSGEQKKAIVDLLFKTNRKVTVKQLKEDYFKKIECFDSVEISGVEDRFNASLGTYHDLLKIIKDKDFLDNEENEDILEDIVLTLTLFEDREMIEERLKTYAHLFDDKVMKQLKRRRYTGWGRLSRKLINGIRDKQSGKTILDFLKSDGFANRNFMQLIHDDSLTFKEDIQKAQVSGQGDSLHEHIANLAGSPAIKKGILQTVKVVDELVKVMGRHKPENIVIEMARENQTTQKGQKNSRERMKRIEEGIKELGSQILKEHPVENTQLQNEKLYLYYLQNGRDMYVDQELDINRLSDYDVDHIVPQSFLKDDSIDNKVLTRSDKNRGKSDNVPSEEVVKKMKNYWRQLLNAKLITQRKFDNLTKAERGGLSELDKAGFIKRQLVETRQITKHVAQILDSRMNTKYDENDKLIREVKVITLKSKLVSDFRKDFQFYKVREINNYHHAHDAYLNAVVGTALIKKYPKLESEFVYGDYKVYDVRKMIAKSEQEIGKATAKYFFYSNIMNFFKTEITLANGEIRKRPLIETNGETGEIVWDKGRDFATVRKVLSMPQVNIVKKTEVQTGGFSKESILPKRNSDKLIARKKDWDPKKYGGFDSPTVAYSVLVVAKVEKGKSKKLKSVKELLGITIMERSSFEKNPIDFLEAKGYKEVKKDLIIKLPKYSLFELENGRKRMLASAGELQKGNELALPSKYVNFLYLASHYEKLKGSPEDNEQKQLFVEQHKHYLDEIIEQISEFSKRVILADANLDKVLSAYNKHRDKPIREQAENIIHLFTLTNLGAPAAFKYFDTTIDKKRYTSTKEVLDATLIHQSITGLYETRIDLSQLGGDGAPESATESGGTSTESEGSAGTSTESEGSAGSAGSTSTEEGTSTESEGSSSGAAFKPNPINYILGLDIGIASVGWAMVEIDEEENPIRLIDLGVRVFERAEVPKTGDSLAMARRLARSVRRLTRRRAHRLLRARRLLKREGVLQAADFDENGLIKSLPNTPWQLRAAALDRKLTPLEWSAVLLHLIKHRGYLSQRKNEGETADKELGALLKGVANNAHALQTGDFRTPAELALNKFEKESGHIRNQRGDYSHTFSRKDLQAELILLFEKQKEFGNPHVSGGLKEGIETLLMTQRPALSGDAVQKMLGHCTFEPAEPKAAKNTYTAERFIWLTKLNNLRILEQGSERPLTDTERATLMDEPYRKSKLTYAQARKLLGLEDTAFFKGLRYGKDNAEASTLMEMKAYHAISRALEKEGLKDKKSPLNLSSELQDEIGTAFSLFKTDEDITGRLKDRVQPEILEALLKHISFDKFVQISLKALRRIVPLMEQGKRYDEACAEIYGDHYGKKNTEEKIYLPPIPADEIRNPVVLRALSQARKVINGVVRRYGSPARIHIETAREVGKSFKDRKEIEKRQEENRKDREKAAAKFREYFPNFVGEPKSKDILKLRLYEQQHGKCLYSGKEINLVRLNEKGYVEIDHALPFSRTWDDSFNNKVLVLGSENQNKGNQTPYEYFNGKDNSREWQEFKARVETSRFPRSKKQRILLQKFDEDGFKECNLNDTRYVNRFLCQFVADHILLTGKGKRRVFASNGQITNLLRGFWGLRKVRAENDRHHALDAVVVACSTVAMQQKITRFVRYKEMNAFDGKTIDKETGKVLHQKTHFPQPWEFFAQEVMIRVFGKPDGKPEFEEADTPEKLRTLLAEKLSSRPEAVHEYVTPLFVSRAPNRKMSGAHKDTLRSAKRFVKHNEKISVKRVWLTEIKLADLENMVNYKNGREIELYEALKARLEAYGGNAKQAFDPKDNPFYKKGGQLVKAVRVEKTQESGVLLNKKNAYTIADNGDMVRVDVFCKVDKKGKNQYFIVPIYAWQVAENILPDIDCKGYRIDDSYTFCFSLHKYDLIAFQKDEKSKVEFAYYINCDSSNGRFYLAWHDKGSKEQQFRISTQNLVLIQKYQVNELGKEIRPCRLKKRPPVRSGKRTADGSGGGSPKKKRKV

SEQ ID NO: 63 - RNA, 8153 nt, synthetic construct
  misc_feature 1..8153: note = Synthetic: Cas9-Cas9 fusion -41 amino acid residue linker and HiBit tag (mRNA R)-mRNA sequence
  source 1..8153: mol_type = other RNA
gggaagctcagaataaacgctcaactttggccggatctgccaccatggacaagaagtactccatcggcctggacatcggcaccaactccgtgggctgggccgtgatcaccgacgagtacaaggtgccctccaagaagttcaaggtgctgggcaacaccgaccggcactccatcaagaagaacctgatcggcgccctgctgttcgactccggcgagaccgccgaggccacccggctgaagcggaccgcccggcggcggtacacccggcggaagaaccggatctgctacctgcaggagatcttctccaacgagatggccaaggtggacgactccttcttccaccggctggaggagtccttcctggtggaggaggacaagaagcacgagcggcaccccatcttcggcaacatcgtggacgaggtggcctaccacgagaagtaccccaccatctaccacctgcggaagaagctggtggactccaccgacaaggccgacctgcggctgatctacctggccctggcccacatgatcaagttccggggccacttcctgatcgagggcgacctgaaccccgacaactccgacgtggacaagctgttcatccagctggtgcagacctacaaccagctgttcgaggagaaccccatcaacgcctccggcgtggacgccaaggccatcctgtccgcccggctgtccaagtcccggcggctggagaacctgatcgcccagctgcccggcgagaagaagaacggcctgttcggcaacctgatcgccctgtccctgggcctgacccccaacttcaagtccaacttcgacctggccgaggacgccaagctgcagctgtccaaggacacctacgacgacgacctggacaacctgctggcccagatcggcgaccagtacgccgacctgttcctggccgccaagaacctgtccgacgccatcctgctgtccgacatcctgcgggtgaacaccgagatcaccaaggcccccctgtccgcctccatgatcaagcggtacgacgagcaccaccaggacctgaccctgctgaaggccctggtgcggcagcagctgcccgagaagtacaaggagatcttcttcgaccagtccaagaacggctacgccggctacatcgacggcggcgcctcccaggaggagttctacaagttcatcaagcccatcctggagaagatggacggcaccgaggagctgctggtgaagctgaaccgggaggacctgctgcggaagcagcggaccttcgacaacggctccatcccccaccagatccacctgggcgagctgcacgccatcctgcggcggcaggaggacttctaccccttcctgaaggacaaccgggagaagatcgagaagatcctgaccttccggatcccctactacgtgggccccctggcccggggcaactcccggttcgcctggatgacccggaagtccgaggagaccatcaccccctggaacttcgaggaggtggtggacaagggcgcctccgcccagtccttcatcgagcggatgaccaacttcgacaagaacctgcccaacgagaaggtgctgcccaagcactccctgctgtacgagtacttcaccgtgtacaacgagctgaccaaggtgaagtacgtgaccgagggcatgcggaagcccgccttcctgtccggcgagcagaagaaggccatcgtggacctgctgttcaagaccaaccggaaggtgaccgtgaagcagctgaaggaggactacttcaagaagatcgagtgcttcgactccgtggagatctccggcgtggaggaccggttcaacgcctccctgggcacctaccacgacctgctgaagatcatcaaggacaaggacttcctggacaacgaggagaacgaggacatcctggaggacatcgtgctgaccctgaccctgttcgaggaccgggagatgatcgaggagcggctgaagacctacgcccacctgttcgacgacaaggtgatgaagcagctgaagcggcggcggtacaccggctggggccggctgtcccggaagctgatcaacggcatccgggacaagcagtccggcaagaccatcctggacttcctgaagtccgacggcttcgccaaccggaacttcatgcagctgatccacgacgactccctgaccttcaaggaggacatccagaaggcccaggtgtccggccagggcgactccctgcacgagcacatcgccaacctggccggctcccccgccatcaagaagggcatcctgcagaccgtgaaggtggtggacgagctggtgaaggtgatgggccggcacaagcccgagaacatcgtgatcgagatggcccgggagaaccagaccacccagaagggccagaagaactcccgggagcggatgaagcggatcgaggagggcatcaaggagctgggctcccagatcctgaaggagcaccccgtggagaacacccagctgcagaacgagaagctgtacctgtactacctgcagaacggccgggacatgtacgtggaccaggagctggacatcaaccggctgtccgactacgacgtggaccacatcgtgccccagtccttcctgaaggacgactccatcgacaacaaggtgctgacccggtccgacaagaaccggggcaagtccgacaacgtgccctccgaggaggtggtgaagaagatgaagaactactggcggcagctgctgaacgccaagctgatcacccagcggaagttcgacaacctgaccaaggccgagcggggcggcctgtccgagctggacaaggccggcttcatcaagcggcagctggtggagacccggcagatcaccaagcacgtggcccagatcctggactcccggatgaacaccaagtacgacgagaacgacaagctgatccgggaggtgaaggtgatcaccctgaagtccaagctggtgtccgacttccggaaggacttccagttctacaaggtgcgggagatcaacaactaccaccacgcccacgacgcctacctgaacgccgtggtgggcaccgccctgatcaagaagtaccccaagctggagtccgagttcgtgtacggcgactacaaggtgtacgacgtgcggaagatgatcgccaagtccgagcaggagatcggcaaggccaccgccaagtacttcttctactccaacatcatgaacttcttcaagaccgagatcaccctggccaacggcgagatccggaagcggcccctgatcgagaccaacggcgagaccggcgagatcgtgtgggacaagggccgggacttcgccaccgtgcggaaggtgctgtccatgccccaggtgaacatcgtgaagaagaccgaggtgcagaccggcggcttctccaaggagtccatcctgcccaagcggaactccgacaagctgatcgcccggaagaaggactgggaccccaagaagtacggcggcttcgactcccccaccgtggcctactccgtgctggtggtggccaaggtggagaagggcaagtccaagaagctgaagtccgtgaaggagctgctgggcatcaccatcatggagcggtcctccttcgagaagaaccccatcgacttcctggaggccaagggctacaaggaggtgaagaaggacctgatcatcaagctgcccaagtactccctgttcgagctggagaacggccggaagcggatgctggcctccgccggcgagctgcagaagggcaacgagctggccctgccctccaagtacgtgaacttcctgtacctggcctcccactacgagaagctgaagggctcccccgaggacaacgagcagaagcagctgttcgtggagcagcacaagcactacctggacgagatcatcgagcagatctccgagttctccaagcgggtgatcctggccgacgccaacctggacaaggtgctgtccgcctacaacaagcaccgggacaagcccatccgggagcaggccgagaacatcatccacctgttcaccctgaccaacctgggcgcccccgccgccttcaagtacttcgacaccaccatcgacaagaagcggtacacctccaccaaggaggtgctggacgccaccctgatccaccagtccatcaccggcctgtacgagacccggatcgacctgtcccagctgggcggcgacggcgcccccgagtccgccaccgagtccggcggcacctccaccgagtccgagggctccgccggcacctccaccgagtccgagggctccgccggctccgccggctccacctccggctcctcctccggtgccgccttcaagcccaaccccatcaactacatcctgggcctggacatcggcatcgcctccgtgggctgggccatggtggagatcgacgaggaggagaaccccatccggctgatcgacctgggcgtgcgggtgttcgagcgggccgaggtgcccaagaccggcgactccctggccatggcccggcggctggcccggtccgtgcggcggctgacccggcggcgggcccaccggctgctgcgggcccggcggctgctgaagcgggagggcgtgctgcaggccgccgacttcgacgagaacggcctgatcaagtccctgcccaacaccccctggcagctgcgggccgccgccctggaccggaagctgacccccctggagtggtccgccgtgctgctgcacctgatcaagcaccggggctacctgtcccagcggaagaacgagggcgagaccgccgacaaggagctgggcgccctgctgaagggcgtggccaacaacgcccacgccctgcagaccggcgacttccggacccccgccgagctggccctgaacaagttcgagaaggagtccggccacatccggaaccagcggggcgactactcccacaccttctcccggaaggacctgcaggccgagctgatcctgctgttcgagaagcagaaggagttcggcaacccccacgtgtccggcggcctgaaggagggcatcgagaccctgctgatgacccagcggcccgccctgtccggcgacgccgtgcagaagatgctgggccactgcaccttcgagcccgccgagcccaaggccgccaagaacacctacaccgccgagcggttcatctggctgaccaagctgaacaacctgcggatcctggagcagggctccgagcggcccctgaccgacaccgagcgggccaccctgatggacgagccctaccggaagtccaagctgacctacgcccaggcccggaagctgctgggcctggaggacaccgccttcttcaagggcctgcggtacggcaaggacaacgccgaggcctccaccctgatggagatgaaggcctaccacgccatctcccgggccctggagaaggagggcctgaaggacaagaagtcccccctgaacctgtcctccgagctgcaggacgagatcggcaccgccttctccctgttcaagaccgacgaggacatcaccggccggctgaaggaccgggtgcagcccgagatcctggaggccctgctgaagcacatctccttcgacaagttcgtgcagatctccctgaaggccctgcggcggatcgtgcccctgatggagcagggcaagcggtacgacgaggcctgcgccgagatctacggcgaccactacggcaagaagaacaccgaggagaagatctacctgccccccatccccgccgacgagatccggaaccccgtggtgctgcgggccctgtcccaggcccggaaggtgatcaacggcgtggtgcggcggtacggctcccccgcccggatccacatcgagaccgcccgggaggtgggcaagtccttcaaggaccggaaggagatcgagaagcggcaggaggagaaccggaaggaccgggagaaggccgccgccaagttccgggagtacttccccaacttcgtgggcgagcccaagtccaaggacatcctgaagctgcggctgtacgagcagcagcacggcaagtgcctgtactccggcaaggagatcaacctggtgcggctgaacgagaagggctacgtggagatcgaccacgccctgcccttctcccggacctgggacgactccttcaacaacaaggtgctggtgctgggctccgagaaccagaacaagggcaaccagaccccctacgagtacttcaacggcaaggacaactcccgggagtggcaggagttcaaggcccgggtggagacctcccggttcccccggtccaagaagcagcggatcctgctgcagaagttcgacgaggacggcttcaaggagtgcaacctgaacgacacccggtacgtgaaccgcttcctgtgccagttcgtggccgaccacatcctgctgaccggcaagggcaagcggcgggtgttcgcctccaacggccagatcaccaacctgctgcggggcttctggggcctgcggaaggtgcgggccgagaacgaccggcaccacgccctggacgccgtggtggtggcctgctccaccgtggccatgcagcagaagatcacccggttcgtgcggtacaaggagatgaacgccttcgacggcaagaccatcgacaaggagaccggcaaggtgctgcaccagaagacccacttcccccagccctgggagttcttcgcccaggaggtgatgatccgggtgttcggcaagcccgacggcaagcccgagttcgaggaggccgacacccccgagaagctgcggaccctgctggccgagaagctgtcctcccggcccgaggccgtgcacgagtacgtgacccccctgttcgtgtcccgggcccccaaccggaagatgtccggcgcccacaaggacaccctgcggtccgccaagcggttcgtgaagcacaacgagaagatctccgtgaagcgggtgtggctgaccgagatcaagctggccgacctggagaacatggtgaactacaagaacggccgggagatcgagctgtacgaggccctgaaggcccggctggaggcctacggcggcaacgccaagcaggccttcgaccccaaggacaaccccttctacaagaagggcggccagctggtgaaggccgtgcgggtggagaagacccaggagtccggcgtgctgctgaacaagaagaacgcctacaccatcgccgacaacggcgacatggtgcgggtggacgtgttctgcaaggtggacaagaagggcaagaaccagtacttcatcgtgcccatctacgcctggcaggtggccgagaacatcctgcccgacatcgactgcaagggctaccggatcgacgactcctacaccttctgcttctccctgcacaagtacgacctgatcgccttccagaaggacgagaagtccaaggtggagttcgcctactacatcaactgcgactcctccaacggccggttctacctggcctggcacgacaagggctccaaggagcagcagttccggatctccacccagaacctggtgctgatccagaagtaccaggtgaacgagctgggcaaggagatccggccctgccggctgaagaagcggccccccgtgcggtccggaaagcggaccgccgacggctccggaggaggaagcccgaagaagaagagaaaggtcagcgaaagcgcaacaccggaaagcgtcagcggatggagactgttcaagaagatcagctagctagcaccagcctcaagaacacccgaatggagtctctaagctacataataccaacttacactttacaaaatgttgtcccccaaaatgtagccattcgtatctgctcctaataaaaagaaagtttcttcacattctctcgagaaaaaaaaaaaatggaaaaaaaaaaaacggaaaaaaaaaaaaggtaaaaaaaaaaaatataaaaaaaaaaaacataaaaaaaaaaaacgaaaaaaaaaaaacgtaaaaaaaaaaaactcaaaaaaaaaaaagataaaaaaaaaaaacctaaaaaaaaaaaatgtaaaaaaaaaaaagggaaaaaaaaaaaacgcaaaaaaaaaaaacacaaaaaaaaaaaatgcaaaaaaaaaaaatcgaaaaaaaaaaaatctaaaaaaaaaaaacgaaaaaaaaaaaacccaaaaaaaaaaaagacaaaaaaaaaaaatagaaaaaaaaaaaagttaaaaaaaaaaaactgaaaaaaaaaaaatttaaaaaaaaaaaatctag

SEQ ID NO: 64 - RNA, 7593 nt, synthetic construct
  misc_feature 1..7593: note = Synthetic: Cas9-Cas9 fusion -41 amino acid residue linker and HiBit tag (mRNA R)-ORF sequence
  source 1..7593: mol_type = other RNA
atggacaagaagtactccatcggcctggacatcggcaccaactccgtgggctgggccgtgatcaccgacgagtacaaggtgccctccaagaagttcaaggtgctgggcaacaccgaccggcactccatcaagaagaacctgatcggcgccctgctgttcgactccggcgagaccgccgaggccacccggctgaagcggaccgcccggcggcggtacacccggcggaagaaccggatctgctacctgcaggagatcttctccaacgagatggccaaggtggacgactccttcttccaccggctggaggagtccttcctggtggaggaggacaagaagcacgagcggcaccccatcttcggcaacatcgtggacgaggtggcctaccacgagaagtaccccaccatctaccacctgcggaagaagctggtggactccaccgacaaggccgacctgcggctgatctacctggccctggcccacatgatcaagttccggggccacttcctgatcgagggcgacctgaaccccgacaactccgacgtggacaagctgttcatccagctggtgcagacctacaaccagctgttcgaggagaaccccatcaacgcctccggcgtggacgccaaggccatcctgtccgcccggctgtccaagtcccggcggctggagaacctgatcgcccagctgcccggcgagaagaagaacggcctgttcggcaacctgatcgccctgtccctgggcctgacccccaacttcaagtccaacttcgacctggccgaggacgccaagctgcagctgtccaaggacacctacgacgacgacctggacaacctgctggcccagatcggcgaccagtacgccgacctgttcctggccgccaagaacctgtccgacgccatcctgctgtccgacatcctgcgggtgaacaccgagatcaccaaggcccccctgtccgcctccatgatcaagcggtacgacgagcaccaccaggacctgaccctgctgaaggccctggtgcggcagcagctgcccgagaagtacaaggagatcttcttcgaccagtccaagaacggctacgccggctacatcgacggcggcgcctcccaggaggagttctacaagttcatcaagcccatcctggagaagatggacggcaccgaggagctgctggtgaagctgaaccgggaggacctgctgcggaagcagcggaccttcgacaacggctccatcccccaccagatccacctgggcgagctgcacgccatcctgcggcggcaggaggacttctaccccttcctgaaggacaaccgggagaagatcgagaagatcctgaccttccggatcccctactacgtgggccccctggcccggggcaactcccggttcgcctggatgacccggaagtccgaggagaccatcaccccctggaacttcgaggaggtggtggacaagggcgcctccgcccagtccttcatcgagcggatgaccaacttcgacaagaacctgcccaacgagaaggtgctgcccaagcactccctgctgtacgagtacttcaccgtgtacaacgagctgaccaaggtgaagtacgtgaccgagggcatgcggaagcccgccttcctgtccggcgagcagaagaaggccatcgtggacctgctgttcaagaccaaccggaaggtgaccgtgaagcagctgaaggaggactacttcaagaagatcgagtgcttcgactccgtggagatctccggcgtggaggaccggttcaacgcctccctgggcacctaccacgacctgctgaagatcatcaaggacaaggacttcctggacaacgaggagaacgaggacatcctggaggacatcgtgctgaccctgaccctgttcgaggaccgggagatgatcgaggagcggctgaagacctacgcccacctgttcgacgacaaggtgatgaagcagctgaagcggcggcggtacaccggctggggccggctgtcccggaagctgatcaacggcatccgggacaagcagtccggcaagaccatcctggacttcctgaagtccgacggcttcgccaaccggaacttcatgcagctgatccacgacgactccctgaccttcaaggaggacatccagaaggcccaggtgtccggccagggcgactccctgcacgagcacatcgccaacctggccggctcccccgccatcaagaagggcatcctgcagaccgtgaaggtggtggacgagctggtgaaggtgatgggccggcacaagcccgagaacatcgtgatcgagatggcccgggagaaccagaccacccagaagggccagaagaactcccgggagcggatgaagcggatcgaggagggcatcaaggagctgggctcccagatcctgaaggagcaccccgtggagaacacccagctgcagaacgagaagctgtacctgtactacctgcagaacggccgggacatgtacgtggaccaggagctggacatcaaccggctgtccgactacgacgtggaccacatcgtgccccagtccttcctgaaggacgactccatcgacaacaaggtgctgacccggtccgacaagaaccggggcaagtccgacaacgtgccctccgaggaggtggtgaagaagatgaagaactactggcggcagctgctgaacgccaagctgatcacccagcggaagttcgacaacctgaccaaggccgagcggggcggcctgtccgagctggacaaggccggcttcatcaagcggcagctggtggagacccggcagatcaccaagcacgtggcccagatcctggactcccggatgaacaccaagtacgacgagaacgacaagctgatccgggaggtgaaggtgatcaccctgaagtccaagctggtgtccgacttccggaaggacttccagttctacaaggtgcgggagatcaacaactaccaccacgcccacgacgcctacctgaacgccgtggtgggcaccgccctgatcaagaagtaccccaagctggagtccgagttcgtgtacggcgactacaaggtgtacgacgtgcggaagatgatcgccaagtccgagcaggagatcggcaaggccaccgccaagtacttcttctactccaacatcatgaacttcttcaagaccgagatcaccctggccaacggcgagatccggaagcggcccctgatcgagaccaacggcgagaccggcgagatcgtgtgggacaagggccgggacttcgccaccgtgcggaaggtgctgtccatgccccaggtgaacatcgtgaagaagaccgaggtgcagaccggcggcttctccaaggagtccatcctgcccaagcggaactccgacaagctgatcgcccggaagaaggactgggaccccaagaagtacggcggcttcgactcccccaccgtggcctactccgtgctggtggtggccaaggtggagaagggcaagtccaagaagctgaagtccgtgaaggagctgctgggcatcaccatcatggagcggtcctccttcgagaagaaccccatcgacttcctggaggccaagggctacaaggaggtgaagaaggacctgatcatcaagctgcccaagtactccctgttcgagctggagaacggccggaagcggatgctggcctccgccggcgagctgcagaagggcaacgagctggccctgccctccaagtacgtgaacttcctgtacctggcctcccactacgagaagctgaagggctcccccgaggacaacgagcagaagcagctgttcgtggagcagcacaagcactacctggacgagatcatcgagcagatctccgagttctccaagcgggtgatcctggccgacgccaacctggacaaggtgctgtccgcctacaacaagcaccgggacaagcccatccgggagcaggccgagaacatcatccacctgttcaccctgaccaacctgggcgcccccgccgccttcaagtacttcgacaccaccatcgacaagaagcggtacacctccaccaaggaggtgctggacgccaccctgatccaccagtccatcaccggcctgtacgagacccggatcgacctgtcccagctgggcggcgacggcgcccccgagtccgccaccgagtccggcggcacctccaccgagtccgagggctccgccggcacctccaccgagtccgagggctccgccggctccgccggctccacctccggctcctcctccggtgccgccttcaagcccaaccccatcaactacatcctgggcctggacatcggcatcgcctccgtgggctgggccatggtggagatcgacgaggaggagaaccccatccggctgatcgacctgggcgtgcgggtgttcgagcgggccgaggtgcccaagaccggcgactccctggccatggcccggcggctggcccggtccgtgcggcggctgacccggcggcgggcccaccggctgctgcgggcccggcggctgctgaagcgggagggcgtgctgcaggccgccgacttcgacgagaacggcctgatcaagtccctgcccaacaccccctggcagctgcgggccgccgccctggaccggaagctgacccccctggagtggtccgccgtgctgctgcacctgatcaagcaccggggctacctgtcccagcggaagaacgagggcgagaccgccgacaaggagctgggcgccctgctgaagggcgtggccaacaacgcccacgccctgcagaccggcgacttccggacccccgccgagctggccctgaacaagttcgagaaggagtccggccacatccggaaccagcggggcgactactcccacaccttctcccggaaggacctgcaggccgagctgatcctgctgttcgagaagcagaaggagttcggcaacccccacgtgtccggcggcctgaaggagggcatcgagaccctgctgatgacccagcggcccgccctgtccggcgacgccgtgcagaagatgctgggccactgcaccttcgagcccgccgagcccaaggccgccaagaacacctacaccgccgagcggttcatctggctgaccaagctgaacaacctgcggatcctggagcagggctccgagcggcccctgaccgacaccgagcgggccaccctgatggacgagccctaccggaagtccaagctgacctacgcccaggcccggaagctgctgggcctggaggacaccgccttcttcaagggcctgcggtacggcaaggacaacgccgaggcctccaccctgatggagatgaaggcctaccacgccatctcccgggccctggagaaggagggcctgaaggacaagaagtcccccctgaacctgtcctccgagctgcaggacgagatcggcaccgccttctccctgttcaagaccgacgaggacatcaccggccggctgaaggaccgggtgcagcccgagatcctggaggccctgctgaagcacatctccttcgacaagttcgtgcagatctccctgaaggccctgcggcggatcgtgcccctgatggagcagggcaagcggtacgacgaggcctgcgccgagatctacggcgaccactacggcaagaagaacaccgaggagaagatctacctgccccccatccccgccgacgagatccggaaccccgtggtgctgcgggccctgtcccaggcccggaaggtgatcaacggcgtggtgcggcggtacggctcccccgcccggatccacatcgagaccgcccgggaggtgggcaagtccttcaaggaccggaaggagatcgagaagcggcaggaggagaaccggaaggaccgggagaaggccgccgccaagttccgggagtacttccccaacttcgtgggcgagcccaagtccaaggacatcctgaagctgcggctgtacgagcagcagcacggcaagtgcctgtactccggcaaggagatcaacctggtgcggctgaacgagaagggctacgtggagatcgaccacgccctgcccttctcccggacctgggacgactccttcaacaacaaggtgctggtgctgggctccgagaaccagaacaagggcaaccagaccccctacgagtacttcaacggcaaggacaactcccgggagtggcaggagttcaaggcccgggtggagacctcccggttcccccggtccaagaagcagcggatcctgctgcagaagttcgacgaggacggcttcaaggagtgcaacctgaacgacacccggtacgtgaaccgcttcctgtgccagttcgtggccgaccacatcctgctgaccggcaagggcaagcggcgggtgttcgcctccaacggccagatcaccaacctgctgcggggcttctggggcctgcggaaggtgcgggccgagaacgaccggcaccacgccctggacgccgtggtggtggcctgctccaccgtggccatgcagcagaagatcacccggttcgtgcggtacaaggagatgaacgccttcgacggcaagaccatcgacaaggagaccggcaaggtgctgcaccagaagacccacttcccccagccctgggagttcttcgcccaggaggtgatgatccgggtgttcggcaagcccgacggcaagcccgagttcgaggaggccgacacccccgagaagctgcggaccctgctggccgagaagctgtcctcccggcccgaggccgtgcacgagtacgtgacccccctgttcgtgtcccgggcccccaaccggaagatgtccggcgcccacaaggacaccctgcggtccgccaagcggttcgtgaagcacaacgagaagatctccgtgaagcgggtgtggctgaccgagatcaagctggccgacctggagaacatggtgaactacaagaacggccgggagatcgagctgtacgaggccctgaaggcccggctggaggcctacggcggcaacgccaagcaggccttcgaccccaaggacaaccccttctacaagaagggcggccagctggtgaaggccgtgcgggtggagaagacccaggagtccggcgtgctgctgaacaagaagaacgcctacaccatcgccgacaacggcgacatggtgcgggtggacgtgttctgcaaggtggacaagaagggcaagaaccagtacttcatcgtgcccatctacgcctggcaggtggccgagaacatcctgcccgacatcgactgcaagggctaccggatcgacgactcctacaccttctgcttctccctgcacaagtacgacctgatcgccttccagaaggacgagaagtccaaggtggagttcgcctactacatcaactgcgactcctccaacggccggttctacctggcctggcacgacaagggctccaaggagcagcagttccggatctccacccagaacctggtgctgatccagaagtaccaggtgaacgagctgggcaaggagatccggccctgccggctgaagaagcggccccccgtgcggtccggaaagcggaccgccgacggctccggaggaggaagcccgaagaagaagagaaaggtcagcgaaagcgcaacaccggaaagcgtcagcggatggagactgttcaagaagatcagctag

SEQ ID NO: 65 - protein, 2530 aa, synthetic construct
  REGION 1..2530: note = Synthetic: Cas9-Cas9 fusion -41 amino acid residue linker and HiBit tag (mRNA R)-amino acid sequence
MDKKYSIGLDIGTNSVGWAVITDEYKVPSKKFKVLGNTDRHSIKKNLIGALLFDSGETAEATRLKRTARRRYTRRKNRICYLQEIFSNEMAKVDDSFFHRLEESFLVEEDKKHERHPIFGNIVDEVAYHEKYPTIYHLRKKLVDSTDKADLRLIYLALAHMIKFRGHFLIEGDLNPDNSDVDKLFIQLVQTYNQLFEENPINASGVDAKAILSARLSKSRRLENLIAQLPGEKKNGLFGNLIALSLGLTPNFKSNFDLAEDAKLQLSKDTYDDDLDNLLAQIGDQYADLFLAAKNLSDAILLSDILRVNTEITKAPLSASMIKRYDEHHQDLTLLKALVRQQLPEKYKEIFFDQSKNGYAGYIDGGASQEEFYKFIKPILEKMDGTEELLVKLNREDLLRKQRTFDNGSIPHQIHLGELHAILRRQEDFYPFLKDNREKIEKILTFRIPYYVGPLARGNSRFAWMTRKSEETITPWNFEEVVDKGASAQSFIERMTNFDKNLPNEKVLPKHSLLYEYFTVYNELTKVKYVTEGMRKPAFLSGEQKKAIVDLLFKTNRKVTVKQLKEDYFKKIECFDSVEISGVEDRFNASLGTYHDLLKIIKDKDFLDNEENEDILEDIVLTLTLFEDREMIEERLKTYAHLFDDKVMKQLKRRRYTGWGRLSRKLINGIRDKQSGKTILDFLKSDGFANRNFMQLIHDDSLTFKEDIQKAQVSGQGDSLHEHIANLAGSPAIKKGILQTVKVVDELVKVMGRHKPENIVIEMARENQTTQKGQKNSRERMKRIEEGIKELGSQILKEHPVENTQLQNEKLYLYYLQNGRDMYVDQELDINRLSDYDVDHIVPQSFLKDDSIDNKVLTRSDKNRGKSDNVPSEEVVKKMKNYWRQLLNAKLITQRKFDNLTKAERGGLSELDKAGFIKRQLVETRQITKHVAQILDSRMNTKYDENDKLIREVKVITLKSKLVSDFRKDFQFYKVREINNYHHAHDAYLNAVVGTALIKKYPKLESEFVYGDYKVYDVRKMIAKSEQEIGKATAKYFFYSNIMNFFKTEITLANGEIRKRPLIETNGETGEIVWDKGRDFATVRKVLSMPQVNIVKKTEVQTGGFSKESILPKRNSDKLIARKKDWDPKKYGGFDSPTVAYSVLVVAKVEKGKSKKLKSVKELLGITIMERSSFEKNPIDFLEAKGYKEVKKDLIIKLPKYSLFELENGRKRMLASAGELQKGNELALPSKYVNFLYLASHYEKLKGSPEDNEQKQLFVEQHKHYLDEIIEQISEFSKRVILADANLDKVLSAYNKHRDKPIREQAENIIHLFTLTNLGAPAAFKYFDTTIDKKRYTSTKEVLDATLIHQSITGLYETRIDLSQLGGDGAPESATESGGTSTESEGSAGTSTESEGSAGSAGSTSGSSSGAAFKPNPINYILGLDIGIASVGWAMVEIDEEENPIRLIDLGVRVFERAEVPKTGDSLAMARRLARSVRRLTRRRAHRLLRARRLLKREGVLQAADFDENGLIKSLPNTPWQLRAAALDRKLTPLEWSAVLLHLIKHRGYLSQRKNEGETADKELGALLKGVANNAHALQTGDFRTPAELALNKFEKESGHIRNQRGDYSHTFSRKDLQAELILLFEKQKEFGNPHVSGGLKEGIETLLMTQRPALSGDAVQKMLGHCTFEPAEPKAAKNTYTAERFIWLTKLNNLRILEQGSERPLTDTERATLMDEPYRKSKLTYAQARKLLGLEDTAFFKGLRYGKDNAEASTLMEMKAYHAISRALEKEGLKDKKSPLNLSSELQDEIGTAFSLFKTDEDITGRLKDRVQPEILEALLKHISFDKFVQISLKALRRIVPLMEQGKRYDEACAEIYGDHYGKKNTEEKIYLPPIPADEIRNPVVLRALSQARKVINGVVRRYGSPARIHIETAREVGKSFKDRKEIEKRQEENRKDREKAAAKFREYFPNFVGEPKSKDILKLRLYEQQHGKCLYSGKEINLVRLNEKGYVEIDHALPFSRTWDDSFNNKVLVLGSENQNKGNQTPYEYFNGKDNSREWQEFKARVETSRFPRSKKQRILLQKFDEDGFKECNLNDTRYVNRFLCQFVADHILLTGKGKRRVFASNGQITNLLRGFWGLRKVRAENDRHHALDAVVVACSTVAMQQKITRFVRYKEMNAFDGKTIDKETGKVLHQKTHFPQPWEFFAQEVMIRVFGKPDGKPEFEEADTPEKLRTLLAEKLSSRPEAVHEYVTPLFVSRAPNRKMSGAHKDTLRSAKRFVKHNEKISVKRVWLTEIKLADLENMVNYKNGREIELYEALKARLEAYGGNAKQAFDPKDNPFYKKGGQLVKAVRVEKTQESGVLLNKKNAYTIADNGDMVRVDVFCKVDKKGKNQYFIVPIYAWQVAENILPDIDCKGYRIDDSYTFCFSLHKYDLIAFQKDEKSKVEFAYYINCDSSNGRFYLAWHDKGSKEQQFRISTQNLVLIQKYQVNELGKEIRPCRLKKRPPVRSGKRTADGSGGGSPKKKRKVSESATPESVSGWRLFKKIS

SEQ ID NO: 66 - RNA, 7536 nt, synthetic construct
  misc_feature 1..7536: note = Synthetic: Cas9-Cas9 fusion -41 amino acid residual linker (mRNA R)-mRNA sequence
  source 1..7536: mol_type = other RNA
atggacaagaagtactccatcggcctggacatcggcaccaactccgtgggctgggccgtgatcaccgacgagtacaaggtgccctccaagaagttcaaggtgctgggcaacaccgaccggcactccatcaagaagaacctgatcggcgccctgctgttcgactccggcgagaccgccgaggccacccggctgaagcggaccgcccggcggcggtacacccggcggaagaaccggatctgctacctgcaggagatcttctccaacgagatggccaaggtggacgactccttcttccaccggctggaggagtccttcctggtggaggaggacaagaagcacgagcggcaccccatcttcggcaacatcgtggacgaggtggcctaccacgagaagtaccccaccatctaccacctgcggaagaagctggtggactccaccgacaaggccgacctgcggctgatctacctggccctggcccacatgatcaagttccggggccacttcctgatcgagggcgacctgaaccccgacaactccgacgtggacaagctgttcatccagctggtgcagacctacaaccagctgttcgaggagaaccccatcaacgcctccggcgtggacgccaaggccatcctgtccgcccggctgtccaagtcccggcggctggagaacctgatcgcccagctgcccggcgagaagaagaacggcctgttcggcaacctgatcgccctgtccctgggcctgacccccaacttcaagtccaacttcgacctggccgaggacgccaagctgcagctgtccaaggacacctacgacgacgacctggacaacctgctggcccagatcggcgaccagtacgccgacctgttcctggccgccaagaacctgtccgacgccatcctgctgtccgacatcctgcgggtgaacaccgagatcaccaaggcccccctgtccgcctccatgatcaagcggtacgacgagcaccaccaggacctgaccctgctgaaggccctggtgcggcagcagctgcccgagaagtacaaggagatcttcttcgaccagtccaagaacggctacgccggctacatcgacggcggcgcctcccaggaggagttctacaagttcatcaagcccatcctggagaagatggacggcaccgaggagctgctggtgaagctgaaccgggaggacctgctgcggaagcagcggaccttcgacaacggctccatcccccaccagatccacctgggcgagctgcacgccatcctgcggcggcaggaggacttctaccccttcctgaaggacaaccgggagaagatcgagaagatcctgaccttccggatcccctactacgtgggccccctggcccggggcaactcccggttcgcctggatgacccggaagtccgaggagaccatcaccccctggaacttcgaggaggtggtggacaagggcgcctccgcccagtccttcatcgagcggatgaccaacttcgacaagaacctgcccaacgagaaggtgctgcccaagcactccctgctgtacgagtacttcaccgtgtacaacgagctgaccaaggtgaagtacgtgaccgagggcatgcggaagcccgccttcctgtccggcgagcagaagaaggccatcgtggacctgctgttcaagaccaaccggaaggtgaccgtgaagcagctgaaggaggactacttcaagaagatcgagtgcttcgactccgtggagatctccggcgtggaggaccggttcaacgcctccctgggcacctaccacgacctgctgaagatcatcaaggacaaggacttcctggacaacgaggagaacgaggacatcctggaggacatcgtgctgaccctgaccctgttcgaggaccgggagatgatcgaggagcggctgaagacctacgcccacctgttcgacgacaaggtgatgaagcagctgaagcggcggcggtacaccggctggggccggctgtcccggaagctgatcaacggcatccgggacaagcagtccggcaagaccatcctggacttcctgaagtccgacggcttcgccaaccggaacttcatgcagctgatccacgacgactccctgaccttcaaggaggacatccagaaggcccaggtgtccggccagggcgactccctgcacgagcacatcgccaacctggccggctcccccgccatcaagaagggcatcctgcagaccgtgaaggtggtggacgagctggtgaaggtgatgggccggcacaagcccgagaacatcgtgatcgagatggcccgggagaaccagaccacccagaagggccagaagaactcccgggagcggatgaagcggatcgaggagggcatcaaggagctgggctcccagatcctgaaggagcaccccgtggagaacacccagctgcagaacgagaagctgtacctgtactacctgcagaacggccgggacatgtacgtggaccaggagctggacatcaaccggctgtccgactacgacgtggaccacatcgtgccccagtccttcctgaaggacgactccatcgacaacaaggtgctgacccggtccgacaagaaccggggcaagtccgacaacgtgccctccgaggaggtggtgaagaagatgaagaactactggcggcagctgctgaacgccaagctgatcacccagcggaagttcgacaacctgaccaaggccgagcggggcggcctgtccgagctggacaaggccggcttcatcaagcggcagctggtggagacccggcagatcaccaagcacgtggcccagatcctggactcccggatgaacaccaagtacgacgagaacgacaagctgatccgggaggtgaaggtgatcaccctgaagtccaagctggtgtccgacttccggaaggacttccagttctacaaggtgcgggagatcaacaactaccaccacgcccacgacgcctacctgaacgccgtggtgggcaccgccctgatcaagaagtaccccaagctggagtccgagttcgtgtacggcgactacaaggtgtacgacgtgcggaagatgatcgccaagtccgagcaggagatcggcaaggccaccgccaagtacttcttctactccaacatcatgaacttcttcaagaccgagatcaccctggccaacggcgagatccggaagcggcccctgatcgagaccaacggcgagaccggcgagatcgtgtgggacaagggccgggacttcgccaccgtgcggaaggtgctgtccatgccccaggtgaacatcgtgaagaagaccgaggtgcagaccggcggcttctccaaggagtccatcctgcccaagcggaactccgacaagctgatcgcccggaagaaggactgggaccccaagaagtacggcggcttcgactcccccaccgtggcctactccgtgctggtggtggccaaggtggagaagggcaagtccaagaagctgaagtccgtgaaggagctgctgggcatcaccatcatggagcggtcctccttcgagaagaaccccatcgacttcctggaggccaagggctacaaggaggtgaagaaggacctgatcatcaagctgcccaagtactccctgttcgagctggagaacggccggaagcggatgctggcctccgccggcgagctgcagaagggcaacgagctggccctgccctccaagtacgtgaacttcctgtacctggcctcccactacgagaagctgaagggctcccccgaggacaacgagcagaagcagctgttcgtggagcagcacaagcactacctggacgagatcatcgagcagatctccgagttctccaagcgggtgatcctggccgacgccaacctggacaaggtgctgtccgcctacaacaagcaccgggacaagcccatccgggagcaggccgagaacatcatccacctgttcaccctgaccaacctgggcgcccccgccgccttcaagtacttcgacaccaccatcgacaagaagcggtacacctccaccaaggaggtgctggacgccaccctgatccaccagtccatcaccggcctgtacgagacccggatcgacctgtcccagctgggcggcgacggcgcccccgagtccgccaccgagtccggcggcacctccaccgagtccgagggctccgccggcacctccaccgagtccgagggctccgccggctccgccggctccacctccggctcctcctccggtgccgccttcaagcccaaccccatcaactacatcctgggcctggacatcggcatcgcctccgtgggctgggccatggtggagatcgacgaggaggagaaccccatccggctgatcgacctgggcgtgcgggtgttcgagcgggccgaggtgcccaagaccggcgactccctggccatggcccggcggctggcccggtccgtgcggcggctgacccggcggcgggcccaccggctgctgcgggcccggcggctgctgaagcgggagggcgtgctgcaggccgccgacttcgacgagaacggcctgatcaagtccctgcccaacaccccctggcagctgcgggccgccgccctggaccggaagctgacccccctggagtggtccgccgtgctgctgcacctgatcaagcaccggggctacctgtcccagcggaagaacgagggcgagaccgccgacaaggagctgggcgccctgctgaagggcgtggccaacaacgcccacgccctgcagaccggcgacttccggacccccgccgagctggccctgaacaagttcgagaaggagtccggccacatccggaaccagcggggcgactactcccacaccttctcccggaaggacctgcaggccgagctgatcctgctgttcgagaagcagaaggagttcggcaacccccacgtgtccggcggcctgaaggagggcatcgagaccctgctgatgacccagcggcccgccctgtccggcgacgccgtgcagaagatgctgggccactgcaccttcgagcccgccgagcccaaggccgccaagaacacctacaccgccgagcggttcatctggctgaccaagctgaacaacctgcggatcctggagcagggctccgagcggcccctgaccgacaccgagcgggccaccctgatggacgagccctaccggaagtccaagctgacctacgcccaggcccggaagctgctgggcctggaggacaccgccttcttcaagggcctgcggtacggcaaggacaacgccgaggcctccaccctgatggagatgaaggcctaccacgccatctcccgggccctggagaaggagggcctgaaggacaagaagtcccccctgaacctgtcctccgagctgcaggacgagatcggcaccgccttctccctgttcaagaccgacgaggacatcaccggccggctgaaggaccgggtgcagcccgagatcctggaggccctgctgaagcacatctccttcgacaagttcgtgcagatctccctgaaggccctgcggcggatcgtgcccctgatggagcagggcaagcggtacgacgaggcctgcgccgagatctacggcgaccactacggcaagaagaacaccgaggagaagatctacctgccccccatccccgccgacgagatccggaaccccgtggtgctgcgggccctgtcccaggcccggaaggtgatcaacggcgtggtgcggcggtacggctcccccgcccggatccacatcgagaccgcccgggaggtgggcaagtccttcaaggaccggaaggagatcgagaagcggcaggaggagaaccggaaggaccgggagaaggccgccgccaagttccgggagtacttccccaacttcgtgggcgagcccaagtccaaggacatcctgaagctgcggctgtacgagcagcagcacggcaagtgcctgtactccggcaaggagatcaacctggtgcggctgaacgagaagggctacgtggagatcgaccacgccctgcccttctcccggacctgggacgactccttcaacaacaaggtgctggtgctgggctccgagaaccagaacaagggcaaccagaccccctacgagtacttcaacggcaaggacaactcccgggagtggcaggagttcaaggcccgggtggagacctcccggttcccccggtccaagaagcagcggatcctgctgcagaagttcgacgaggacggcttcaaggagtgcaacctgaacgacacccggtacgtgaaccgcttcctgtgccagttcgtggccgaccacatcctgctgaccggcaagggcaagcggcgggtgttcgcctccaacggccagatcaccaacctgctgcggggcttctggggcctgcggaaggtgcgggccgagaacgaccggcaccacgccctggacgccgtggtggtggcctgctccaccgtggccatgcagcagaagatcacccggttcgtgcggtacaaggagatgaacgccttcgacggcaagaccatcgacaaggagaccggcaaggtgctgcaccagaagacccacttcccccagccctgggagttcttcgcccaggaggtgatgatccgggtgttcggcaagcccgacggcaagcccgagttcgaggaggccgacacccccgagaagctgcggaccctgctggccgagaagctgtcctcccggcccgaggccgtgcacgagtacgtgacccccctgttcgtgtcccgggcccccaaccggaagatgtccggcgcccacaaggacaccctgcggtccgccaagcggttcgtgaagcacaacgagaagatctccgtgaagcgggtgtggctgaccgagatcaagctggccgacctggagaacatggtgaactacaagaacggccgggagatcgagctgtacgaggccctgaaggcccggctggaggcctacggcggcaacgccaagcaggccttcgaccccaaggacaaccccttctacaagaagggcggccagctggtgaaggccgtgcgggtggagaagacccaggagtccggcgtgctgctgaacaagaagaacgcctacaccatcgccgacaacggcgacatggtgcgggtggacgtgttctgcaaggtggacaagaagggcaagaaccagtacttcatcgtgcccatctacgcctggcaggtggccgagaacatcctgcccgacatcgactgcaagggctaccggatcgacgactcctacaccttctgcttctccctgcacaagtacgacctgatcgccttccagaaggacgagaagtccaaggtggagttcgcctactacatcaactgcgactcctccaacggccggttctacctggcctggcacgacaagggctccaaggagcagcagttccggatctccacccagaacctggtgctgatccagaagtaccaggtgaacgagctgggcaaggagatccggccctgccggctgaagaagcggccccccgtgcggtccggaaagcggaccgccgacggctccggaggaggaagcccgaagaagaagagaaaggtctag

SEQ ID NO: 67 - protein, 2511 aa, synthetic construct
  REGION 1..2511: note = Synthetic: Cas9-Cas9 fusion -41 amino acid residual linker (mRNA R)-amino acid sequence
MDKKYSIGLDIGTNSVGWAVITDEYKVPSKKFKVLGNTDRHSIKKNLIGALLFDSGETAEATRLKRTARRRYTRRKNRICYLQEIFSNEMAKVDDSFFHRLEESFLVEEDKKHERHPIFGNIVDEVAYHEKYPTIYHLRKKLVDSTDKADLRLIYLALAHMIKFRGHFLIEGDLNPDNSDVDKLFIQLVQTYNQLFEENPINASGVDAKAILSARLSKSRRLENLIAQLPGEKKNGLFGNLIALSLGLTPNFKSNFDLAEDAKLQLSKDTYDDDLDNLLAQIGDQYADLFLAAKNLSDAILLSDILRVNTEITKAPLSASMIKRYDEHHQDLTLLKALVRQQLPEKYKEIFFDQSKNGYAGYIDGGASQEEFYKFIKPILEKMDGTEELLVKLNREDLLRKQRTFDNGSIPHQIHLGELHAILRRQEDFYPFLKDNREKIEKILTFRIPYYVGPLARGNSRFAWMTRKSEETITPWNFEEVVDKGASAQSFIERMTNFDKNLPNEKVLPKHSLLYEYFTVYNELTKVKYVTEGMRKPAFLSGEQKKAIVDLLFKTNRKVTVKQLKEDYFKKIECFDSVEISGVEDRFNASLGTYHDLLKIIKDKDFLDNEENEDILEDIVLTLTLFEDREMIEERLKTYAHLFDDKVMKQLKRRRYTGWGRLSRKLINGIRDKQSGKTILDFLKSDGFANRNFMQLIHDDSLTFKEDIQKAQVSGQGDSLHEHIANLAGSPAIKKGILQTVKVVDELVKVMGRHKPENIVIEMARENQTTQKGQKNSRERMKRIEEGIKELGSQILKEHPVENTQLQNEKLYLYYLQNGRDMYVDQELDINRLSDYDVDHIVPQSFLKDDSIDNKVLTRSDKNRGKSDNVPSEEVVKKMKNYWRQLLNAKLITQRKFDNLTKAERGGLSELDKAGFIKRQLVETRQITKHVAQILDSRMNTKYDENDKLIREVKVITLKSKLVSDFRKDFQFYKVREINNYHHAHDAYLNAVVGTALIKKYPKLESEFVYGDYKVYDVRKMIAKSEQEIGKATAKYFFYSNIMNFFKTEITLANGEIRKRPLIETNGETGEIVWDKGRDFATVRKVLSMPQVNIVKKTEVQTGGFSKESILPKRNSDKLIARKKDWDPKKYGGFDSPTVAYSVLVVAKVEKGKSKKLKSVKELLGITIMERSSFEKNPIDFLEAKGYKEVKKDLIIKLPKYSLFELENGRKRMLASAGELQKGNELALPSKYVNFLYLASHYEKLKGSPEDNEQKQLFVEQHKHYLDEIIEQISEFSKRVILADANLDKVLSAYNKHRDKPIREQAENIIHLFTLTNLGAPAAFKYFDTTIDKKRYTSTKEVLDATLIHQSITGLYETRIDLSQLGGDGAPESATESGGTSTESEGSAGTSTESEGSAGSAGSTSGSSSGAAFKPNPINYILGLDIGIASVGWAMVEIDEEENPIRLIDLGVRVFERAEVPKTGDSLAMARRLARSVRRLTRRRAHRLLRARRLLKREGVLQAADFDENGLIKSLPNTPWQLRAAALDRKLTPLEWSAVLLHLIKHRGYLSQRKNEGETADKELGALLKGVANNAHALQTGDFRTPAELALNKFEKESGHIRNQRGDYSHTFSRKDLQAELILLFEKQKEFGNPHVSGGLKEGIETLLMTQRPALSGDAVQKMLGHCTFEPAEPKAAKNTYTAERFIWLTKLNNLRILEQGSERPLTDTERATLMDEPYRKSKLTYAQARKLLGLEDTAFFKGLRYGKDNAEASTLMEMKAYHAISRALEKEGLKDKKSPLNLSSELQDEIGTAFSLFKTDEDITGRLKDRVQPEILEALLKHISFDKFVQISLKALRRIVPLMEQGKRYDEACAEIYGDHYGKKNTEEKIYLPPIPADEIRNPVVLRALSQARKVINGVVRRYGSPARIHIETAREVGKSFKDRKEIEKRQEENRKDREKAAAKFREYFPNFVGEPKSKDILKLRLYEQQHGKCLYSGKEINLVRLNEKGYVEIDHALPFSRTWDDSFNNKVLVLGSENQNKGNQTPYEYFNGKDNSREWQEFKARVETSRFPRSKKQRILLQKFDEDGFKECNLNDTRYVNRFLCQFVADHILLTGKGKRRVFASNGQITNLLRGFWGLRKVRAENDRHHALDAVVVACSTVAMQQKITRFVRYKEMNAFDGKTIDKETGKVLHQKTHFPQPWEFFAQEVMIRVFGKPDGKPEFEEADTPEKLRTLLAEKLSSRPEAVHEYVTPLFVSRAPNRKMSGAHKDTLRSAKRFVKHNEKISVKRVWLTEIKLADLENMVNYKNGREIELYEALKARLEAYGGNAKQAFDPKDNPFYKKGGQLVKAVRVEKTQESGVLLNKKNAYTIADNGDMVRVDVFCKVDKKGKNQYFIVPIYAWQVAENILPDIDCKGYRIDDSYTFCFSLHKYDLIAFQKDEKSKVEFAYYINCDSSNGRFYLAWHDKGSKEQQFRISTQNLVLIQKYQVNELGKEIRPCRLKKRPPVRSGKRTADGSGGGSPKKKRKV

SEQ ID NO: 68 - RNA, 8123 nt, synthetic construct
  misc_feature 1..8123: note = Synthetic: Cas9-Cas9 fusion -31 amino acid residue linker and HiBit tag (mRNA S)-mRNA sequence
  source 1..8123: mol_type = other RNA
gggaagctcagaataaacgctcaactttggccggatctgccaccatggacaagaagtactccatcggcctggacatcggcaccaactccgtgggctgggccgtgatcaccgacgagtacaaggtgccctccaagaagttcaaggtgctgggcaacaccgaccggcactccatcaagaagaacctgatcggcgccctgctgttcgactccggcgagaccgccgaggccacccggctgaagcggaccgcccggcggcggtacacccggcggaagaaccggatctgctacctgcaggagatcttctccaacgagatggccaaggtggacgactccttcttccaccggctggaggagtccttcctggtggaggaggacaagaagcacgagcggcaccccatcttcggcaacatcgtggacgaggtggcctaccacgagaagtaccccaccatctaccacctgcggaagaagctggtggactccaccgacaaggccgacctgcggctgatctacctggccctggcccacatgatcaagttccggggccacttcctgatcgagggcgacctgaaccccgacaactccgacgtggacaagctgttcatccagctggtgcagacctacaaccagctgttcgaggagaaccccatcaacgcctccggcgtggacgccaaggccatcctgtccgcccggctgtccaagtcccggcggctggagaacctgatcgcccagctgcccggcgagaagaagaacggcctgttcggcaacctgatcgccctgtccctgggcctgacccccaacttcaagtccaacttcgacctggccgaggacgccaagctgcagctgtccaaggacacctacgacgacgacctggacaacctgctggcccagatcggcgaccagtacgccgacctgttcctggccgccaagaacctgtccgacgccatcctgctgtccgacatcctgcgggtgaacaccgagatcaccaaggcccccctgtccgcctccatgatcaagcggtacgacgagcaccaccaggacctgaccctgctgaaggccctggtgcggcagcagctgcccgagaagtacaaggagatcttcttcgaccagtccaagaacggctacgccggctacatcgacggcggcgcctcccaggaggagttctacaagttcatcaagcccatcctggagaagatggacggcaccgaggagctgctggtgaagctgaaccgggaggacctgctgcggaagcagcggaccttcgacaacggctccatcccccaccagatccacctgggcgagctgcacgccatcctgcggcggcaggaggacttctaccccttcctgaaggacaaccgggagaagatcgagaagatcctgaccttccggatcccctactacgtgggccccctggcccggggcaactcccggttcgcctggatgacccggaagtccgaggagaccatcaccccctggaacttcgaggaggtggtggacaagggcgcctccgcccagtccttcatcgagcggatgaccaacttcgacaagaacctgcccaacgagaaggtgctgcccaagcactccctgctgtacgagtacttcaccgtgtacaacgagctgaccaaggtgaagtacgtgaccgagggcatgcggaagcccgccttcctgtccggcgagcagaagaaggccatcgtggacctgctgttcaagaccaaccggaaggtgaccgtgaagcagctgaaggaggactacttcaagaagatcgagtgcttcgactccgtggagatctccggcgtggaggaccggttcaacgcctccctgggcacctaccacgacctgctgaagatcatcaaggacaaggacttcctggacaacgaggagaacgaggacatcctggaggacatcgtgctgaccctgaccctgttcgaggaccgggagatgatcgaggagcggctgaagacctacgcccacctgttcgacgacaaggtgatgaagcagctgaagcggcggcggtacaccggctggggccggctgtcccggaagctgatcaacggcatccgggacaagcagtccggcaagaccatcctggacttcctgaagtccgacggcttcgccaaccggaacttcatgcagctgatccacgacgactccctgaccttcaaggaggacatccagaaggcccaggtgtccggccagggcgactccctgcacgagcacatcgccaacctggccggctcccccgccatcaagaagggcatcctgcagaccgtgaaggtggtggacgagctggtgaaggtgatgggccggcacaagcccgagaacatcgtgatcgagatggcccgggagaaccagaccacccagaagggccagaagaactcccgggagcggatgaagcggatcgaggagggcatcaaggagctgggctcccagatcctgaaggagcaccccgtggagaacacccagctgcagaacgagaagctgtacctgtactacctgcagaacggccgggacatgtacgtggaccaggagctggacatcaaccggctgtccgactacgacgtggaccacatcgtgccccagtccttcctgaaggacgactccatcgacaacaaggtgctgacccggtccgacaagaaccggggcaagtccgacaacgtgccctccgaggaggtggtgaagaagatgaagaactactggcggcagctgctgaacgccaagctgatcacccagcggaagttcgacaacctgaccaaggccgagcggggcggcctgtccgagctggacaaggccggcttcatcaagcggcagctggtggagacccggcagatcaccaagcacgtggcccagatcctggactcccggatgaacaccaagtacgacgagaacgacaagctgatccgggaggtgaaggtgatcaccctgaagtccaagctggtgtccgacttccggaaggacttccagttctacaaggtgcgggagatcaacaactaccaccacgcccacgacgcctacctgaacgccgtggtgggcaccgccctgatcaagaagtaccccaagctggagtccgagttcgtgtacggcgactacaaggtgtacgacgtgcggaagatgatcgccaagtccgagcaggagatcggcaaggccaccgccaagtacttcttctactccaacatcatgaacttcttcaagaccgagatcaccctggccaacggcgagatccggaagcggcccctgatcgagaccaacggcgagaccggcgagatcgtgtgggacaagggccgggacttcgccaccgtgcggaaggtgctgtccatgccccaggtgaacatcgtgaagaagaccgaggtgcagaccggcggcttctccaaggagtccatcctgcccaagcggaactccgacaagctgatcgcccggaagaaggactgggaccccaagaagtacggcggcttcgactcccccaccgtggcctactccgtgctggtggtggccaaggtggagaagggcaagtccaagaagctgaagtccgtgaaggagctgctgggcatcaccatcatggagcggtcctccttcgagaagaaccccatcgacttcctggaggccaagggctacaaggaggtgaagaaggacctgatcatcaagctgcccaagtactccctgttcgagctggagaacggccggaagcggatgctggcctccgccggcgagctgcagaagggcaacgagctggccctgccctccaagtacgtgaacttcctgtacctggcctcccactacgagaagctgaagggctcccccgaggacaacgagcagaagcagctgttcgtggagcagcacaagcactacctggacgagatcatcgagcagatctccgagttctccaagcgggtgatcctggccgacgccaacctggacaaggtgctgtccgcctacaacaagcaccgggacaagcccatccgggagcaggccgagaacatcatccacctgttcaccctgaccaacctgggcgcccccgccgccttcaagtacttcgacaccaccatcgacaagaagcggtacacctccaccaaggaggtgctggacgccaccctgatccaccagtccatcaccggcctgtacgagacccggatcgacctgtcccagctgggcggcgacggcgcccccgagtccgccaccgagtccggcggcacctccaccgagtccgagggctccgccggcacctccaccgagtccgagggctcctcctccggtgccgccttcaagcccaaccccatcaactacatcctgggcctggacatcggcatcgcctccgtgggctgggccatggtggagatcgacgaggaggagaaccccatccggctgatcgacctgggcgtgcgggtgttcgagcgggccgaggtgcccaagaccggcgactccctggccatggcccggcggctggcccggtccgtgcggcggctgacccggcggcgggcccaccggctgctgcgggcccggcggctgctgaagcgggagggcgtgctgcaggccgccgacttcgacgagaacggcctgatcaagtccctgcccaacaccccctggcagctgcgggccgccgccctggaccggaagctgacccccctggagtggtccgccgtgctgctgcacctgatcaagcaccggggctacctgtcccagcggaagaacgagggcgagaccgccgacaaggagctgggcgccctgctgaagggcgtggccaacaacgcccacgccctgcagaccggcgacttccggacccccgccgagctggccctgaacaagttcgagaaggagtccggccacatccggaaccagcggggcgactactcccacaccttctcccggaaggacctgcaggccgagctgatcctgctgttcgagaagcagaaggagttcggcaacccccacgtgtccggcggcctgaaggagggcatcgagaccctgctgatgacccagcggcccgccctgtccggcgacgccgtgcagaagatgctgggccactgcaccttcgagcccgccgagcccaaggccgccaagaacacctacaccgccgagcggttcatctggctgaccaagctgaacaacctgcggatcctggagcagggctccgagcggcccctgaccgacaccgagcgggccaccctgatggacgagccctaccggaagtccaagctgacctacgcccaggcccggaagctgctgggcctggaggacaccgccttcttcaagggcctgcggtacggcaaggacaacgccgaggcctccaccctgatggagatgaaggcctaccacgccatctcccgggccctggagaaggagggcctgaaggacaagaagtcccccctgaacctgtcctccgagctgcaggacgagatcggcaccgccttctccctgttcaagaccgacgaggacatcaccggccggctgaaggaccgggtgcagcccgagatcctggaggccctgctgaagcacatctccttcgacaagttcgtgcagatctccctgaaggccctgcggcggatcgtgcccctgatggagcagggcaagcggtacgacgaggcctgcgccgagatctacggcgaccactacggcaagaagaacaccgaggagaagatctacctgccccccatccccgccgacgagatccggaaccccgtggtgctgcgggccctgtcccaggcccggaaggtgatcaacggcgtggtgcggcggtacggctcccccgcccggatccacatcgagaccgcccgggaggtgggcaagtccttcaaggaccggaaggagatcgagaagcggcaggaggagaaccggaaggaccgggagaaggccgccgccaagttccgggagtacttccccaacttcgtgggcgagcccaagtccaaggacatcctgaagctgcggctgtacgagcagcagcacggcaagtgcctgtactccggcaaggagatcaacctggtgcggctgaacgagaagggctacgtggagatcgaccacgccctgcccttctcccggacctgggacgactccttcaacaacaaggtgctggtgctgggctccgagaaccagaacaagggcaaccagaccccctacgagtacttcaacggcaaggacaactcccgggagtggcaggagttcaaggcccgggtggagacctcccggttcccccggtccaagaagcagcggatcctgctgcagaagttcgacgaggacggcttcaaggagtgcaacctgaacgacacccggtacgtgaaccgcttcctgtgccagttcgtggccgaccacatcctgctgaccggcaagggcaagcggcgggtgttcgcctccaacggccagatcaccaacctgctgcggggcttctggggcctgcggaaggtgcgggccgagaacgaccggcaccacgccctggacgccgtggtggtggcctgctccaccgtggccatgcagcagaagatcacccggttcgtgcggtacaaggagatgaacgccttcgacggcaagaccatcgacaaggagaccggcaaggtgctgcaccagaagacccacttcccccagccctgggagttcttcgcccaggaggtgatgatccgggtgttcggcaagcccgacggcaagcccgagttcgaggaggccgacacccccgagaagctgcggaccctgctggccgagaagctgtcctcccggcccgaggccgtgcacgagtacgtgacccccctgttcgtgtcccgggcccccaaccggaagatgtccggcgcccacaaggacaccctgcggtccgccaagcggttcgtgaagcacaacgagaagatctccgtgaagcgggtgtggctgaccgagatcaagctggccgacctggagaacatggtgaactacaagaacggccgggagatcgagctgtacgaggccctgaaggcccggctggaggcctacggcggcaacgccaagcaggccttcgaccccaaggacaaccccttctacaagaagggcggccagctggtgaaggccgtgcgggtggagaagacccaggagtccggcgtgctgctgaacaagaagaacgcctacaccatcgccgacaacggcgacatggtgcgggtggacgtgttctgcaaggtggacaagaagggcaagaaccagtacttcatcgtgcccatctacgcctggcaggtggccgagaacatcctgcccgacatcgactgcaagggctaccggatcgacgactcctacaccttctgcttctccctgcacaagtacgacctgatcgccttccagaaggacgagaagtccaaggtggagttcgcctactacatcaactgcgactcctccaacggccggttctacctggcctggcacgacaagggctccaaggagcagcagttccggatctccacccagaacctggtgctgatccagaagtaccaggtgaacgagctgggcaaggagatccggccctgccggctgaagaagcggccccccgtgcggtccggaaagcggaccgccgacggctccggaggaggaagcccgaagaagaagagaaaggtcagcgaaagcgcaacaccggaaagcgtcagcggatggagactgttcaagaagatcagctagctagcaccagcctcaagaacacccgaatggagtctctaagctacataataccaacttacactttacaaaatgttgtcccccaaaatgtagccattcgtatctgctcctaataaaaagaaagtttcttcacattctctcgagaaaaaaaaaaaatggaaaaaaaaaaaacggaaaaaaaaaaaaggtaaaaaaaaaaaatataaaaaaaaaaaacataaaaaaaaaaaacgaaaaaaaaaaaacgtaaaaaaaaaaaactcaaaaaaaaaaaagataaaaaaaaaaaacctaaaaaaaaaaaatgtaaaaaaaaaaaagggaaaaaaaaaaaacgcaaaaaaaaaaaacacaaaaaaaaaaaatgcaaaaaaaaaaaatcgaaaaaaaaaaaatctaaaaaaaaaaaacgaaaaaaaaaaaacccaaaaaaaaaaaagacaaaaaaaaaaaatagaaaaaaaaaaaagttaaaaaaaaaaaactgaaaaaaaaaaaatttaaaaaaaaaaaatctag

SEQ ID NO: 69 - RNA, 7563 nt, synthetic construct
  misc_feature 1..7563: note = Synthetic: Cas9-Cas9 fusion -31 amino acid residue linker and HiBit tag (mRNA S)-ORF sequence
  source 1..7563: mol_type = other RNA
atggacaagaagtactccatcggcctggacatcggcaccaactccgtgggctgggccgtgatcaccgacgagtacaaggtgccctccaagaagttcaaggtgctgggcaacaccgaccggcactccatcaagaagaacctgatcggcgccctgctgttcgactccggcgagaccgccgaggccacccggctgaagcggaccgcccggcggcggtacacccggcggaagaaccggatctgctacctgcaggagatcttctccaacgagatggccaaggtggacgactccttcttccaccggctggaggagtccttcctggtggaggaggacaagaagcacgagcggcaccccatcttcggcaacatcgtggacgaggtggcctaccacgagaagtaccccaccatctaccacctgcggaagaagctggtggactccaccgacaaggccgacctgcggctgatctacctggccctggcccacatgatcaagttccggggccacttcctgatcgagggcgacctgaaccccgacaactccgacgtggacaagctgttcatccagctggtgcagacctacaaccagctgttcgaggagaaccccatcaacgcctccggcgtggacgccaaggccatcctgtccgcccggctgtccaagtcccggcggctggagaacctgatcgcccagctgcccggcgagaagaagaacggcctgttcggcaacctgatcgccctgtccctgggcctgacccccaacttcaagtccaacttcgacctggccgaggacgccaagctgcagctgtccaaggacacctacgacgacgacctggacaacctgctggcccagatcggcgaccagtacgccgacctgttcctggccgccaagaacctgtccgacgccatcctgctgtccgacatcctgcgggtgaacaccgagatcaccaaggcccccctgtccgcctccatgatcaagcggtacgacgagcaccaccaggacctgaccctgctgaaggccctggtgcggcagcagctgcccgagaagtacaaggagatcttcttcgaccagtccaagaacggctacgccggctacatcgacggcggcgcctcccaggaggagttctacaagttcatcaagcccatcctggagaagatggacggcaccgaggagctgctggtgaagctgaaccgggaggacctgctgcggaagcagcggaccttcgacaacggctccatcccccaccagatccacctgggcgagctgcacgccatcctgcggcggcaggaggacttctaccccttcctgaaggacaaccgggagaagatcgagaagatcctgaccttccggatcccctactacgtgggccccctggcccggggcaactcccggttcgcctggatgacccggaagtccgaggagaccatcaccccctggaacttcgaggaggtggtggacaagggcgcctccgcccagtccttcatcgagcggatgaccaacttcgacaagaacctgcccaacgagaaggtgctgcccaagcactccctgctgtacgagtacttcaccgtgtacaacgagctgaccaaggtgaagtacgtgaccgagggcatgcggaagcccgccttcctgtccggcgagcagaagaaggccatcgtggacctgctgttcaagaccaaccggaaggtgaccgtgaagcagctgaaggaggactacttcaagaagatcgagtgcttcgactccgtggagatctccggcgtggaggaccggttcaacgcctccctgggcacctaccacgacctgctgaagatcatcaaggacaaggacttcctggacaacgaggagaacgaggacatcctggaggacatcgtgctgaccctgaccctgttcgaggaccgggagatgatcgaggagcggctgaagacctacgcccacctgttcgacgacaaggtgatgaagcagctgaagcggcggcggtacaccggctggggccggctgtcccggaagctgatcaacggcatccgggacaagcagtccggcaagaccatcctggacttcctgaagtccgacggcttcgccaaccggaacttcatgcagctgatccacgacgactccctgaccttcaaggaggacatccagaaggcccaggtgtccggccagggcgactccctgcacgagcacatcgccaacctggccggctcccccgccatcaagaagggcatcctgcagaccgtgaaggtggtggacgagctggtgaaggtgatgggccggcacaagcccgagaacatcgtgatcgagatggcccgggagaaccagaccacccagaagggccagaagaactcccgggagcggatgaagcggatcgaggagggcatcaaggagctgggctcccagatcctgaaggagcaccccgtggagaacacccagctgcagaacgagaagctgtacctgtactacctgcagaacggccgggacatgtacgtggaccaggagctggacatcaaccggctgtccgactacgacgtggaccacatcgtgccccagtccttcctgaaggacgactccatcgacaacaaggtgctgacccggtccgacaagaaccggggcaagtccgacaacgtgccctccgaggaggtggtgaagaagatgaagaactactggcggcagctgctgaacgccaagctgatcacccagcggaagttcgacaacctgaccaaggccgagcggggcggcctgtccgagctggacaaggccggcttcatcaagcggcagctggtggagacccggcagatcaccaagcacgtggcccagatcctggactcccggatgaacaccaagtacgacgagaacgacaagctgatccgggaggtgaaggtgatcaccctgaagtccaagctggtgtccgacttccggaaggacttccagttctacaaggtgcgggagatcaacaactaccaccacgcccacgacgcctacctgaacgccgtggtgggcaccgccctgatcaagaagtaccccaagctggagtccgagttcgtgtacggcgactacaaggtgtacgacgtgcggaagatgatcgccaagtccgagcaggagatcggcaaggccaccgccaagtacttcttctactccaacatcatgaacttcttcaagaccgagatcaccctggccaacggcgagatccggaagcggcccctgatcgagaccaacggcgagaccggcgagatcgtgtgggacaagggccgggacttcgccaccgtgcggaaggtgctgtccatgccccaggtgaacatcgtgaagaagaccgaggtgcagaccggcggcttctccaaggagtccatcctgcccaagcggaactccgacaagctgatcgcccggaagaaggactgggaccccaagaagtacggcggcttcgactcccccaccgtggcctactccgtgctggtggtggccaaggtggagaagggcaagtccaagaagctgaagtccgtgaaggagctgctgggcatcaccatcatggagcggtcctccttcgagaagaaccccatcgacttcctggaggccaagggctacaaggaggtgaagaaggacctgatcatcaagctgcccaagtactccctgttcgagctggagaacggccggaagcggatgctggcctccgccggcgagctgcagaagggcaacgagctggccctgccctccaagtacgtgaacttcctgtacctggcctcccactacgagaagctgaagggctcccccgaggacaacgagcagaagcagctgttcgtggagcagcacaagcactacctggacgagatcatcgagcagatctccgagttctccaagcgggtgatcctggccgacgccaacctggacaaggtgctgtccgcctacaacaagcaccgggacaagcccatccgggagcaggccgagaacatcatccacctgttcaccctgaccaacctgggcgcccccgccgccttcaagtacttcgacaccaccatcgacaagaagcggtacacctccaccaaggaggtgctggacgccaccctgatccaccagtccatcaccggcctgtacgagacccggatcgacctgtcccagctgggcggcgacggcgcccccgagtccgccaccgagtccggcggcacctccaccgagtccgagggctccgccggcacctccaccgagtccgagggctcctcctccggtgccgccttcaagcccaaccccatcaactacatcctgggcctggacatcggcatcgcctccgtgggctgggccatggtggagatcgacgaggaggagaaccccatccggctgatcgacctgggcgtgcgggtgttcgagcgggccgaggtgcccaagaccggcgactccctggccatggcccggcggctggcccggtccgtgcggcggctgacccggcggcgggcccaccggctgctgcgggcccggcggctgctgaagcgggagggcgtgctgcaggccgccgacttcgacgagaacggcctgatcaagtccctgcccaacaccccctggcagctgcgggccgccgccctggaccggaagctgacccccctggagtggtccgccgtgctgctgcacctgatcaagcaccggggctacctgtcccagcggaagaacgagggcgagaccgccgacaaggagctgggcgccctgctgaagggcgtggccaacaacgcccacgccctgcagaccggcgacttccggacccccgccgagctggccctgaacaagttcgagaaggagtccggccacatccggaaccagcggggcgactactcccacaccttctcccggaaggacctgcaggccgagctgatcctgctgttcgagaagcagaaggagttcggcaacccccacgtgtccggcggcctgaaggagggcatcgagaccctgctgatgacccagcggcccgccctgtccggcgacgccgtgcagaagatgctgggccactgcaccttcgagcccgccgagcccaaggccgccaagaacacctacaccgccgagcggttcatctggctgaccaagctgaacaacctgcggatcctggagcagggctccgagcggcccctgaccgacaccgagcgggccaccctgatggacgagccctaccggaagtccaagctgacctacgcccaggcccggaagctgctgggcctggaggacaccgccttcttcaagggcctgcggtacggcaaggacaacgccgaggcctccaccctgatggagatgaaggcctaccacgccatctcccgggccctggagaaggagggcctgaaggacaagaagtcccccctgaacctgtcctccgagctgcaggacgagatcggcaccgccttctccctgttcaagaccgacgaggacatcaccggccggctgaaggaccgggtgcagcccgagatcctggaggccctgctgaagcacatctccttcgacaagttcgtgcagatctccctgaaggccctgcggcggatcgtgcccctgatggagcagggcaagcggtacgacgaggcctgcgccgagatctacggcgaccactacggcaagaagaacaccgaggagaagatctacctgccccccatccccgccgacgagatccggaaccccgtggtgctgcgggccctgtcccaggcccggaaggtgatcaacggcgtggtgcggcggtacggctcccccgcccggatccacatcgagaccgcccgggaggtgggcaagtccttcaaggaccggaaggagatcgagaagcggcaggaggagaaccggaaggaccgggagaaggccgccgccaagttccgggagtacttccccaacttcgtgggcgagcccaagtccaaggacatcctgaagctgcggctgtacgagcagcagcacggcaagtgcctgtactccggcaaggagatcaacctggtgcggctgaacgagaagggctacgtggagatcgaccacgccctgcccttctcccggacctgggacgactccttcaacaacaaggtgctggtgctgggctccgagaaccagaacaagggcaaccagaccccctacgagtacttcaacggcaaggacaactcccgggagtggcaggagttcaaggcccgggtggagacctcccggttcccccggtccaagaagcagcggatcctgctgcagaagttcgacgaggacggcttcaaggagtgcaacctgaacgacacccggtacgtgaaccgcttcctgtgccagttcgtggccgaccacatcctgctgaccggcaagggcaagcggcgggtgttcgcctccaacggccagatcaccaacctgctgcggggcttctggggcctgcggaaggtgcgggccgagaacgaccggcaccacgccctggacgccgtggtggtggcctgctccaccgtggccatgcagcagaagatcacccggttcgtgcggtacaaggagatgaacgccttcgacggcaagaccatcgacaaggagaccggcaaggtgctgcaccagaagacccacttcccccagccctgggagttcttcgcccaggaggtgatgatccgggtgttcggcaagcccgacggcaagcccgagttcgaggaggccgacacccccgagaagctgcggaccctgctggccgagaagctgtcctcccggcccgaggccgtgcacgagtacgtgacccccctgttcgtgtcccgggcccccaaccggaagatgtccggcgcccacaaggacaccctgcggtccgccaagcggttcgtgaagcacaacgagaagatctccgtgaagcgggtgtggctgaccgagatcaagctggccgacctggagaacatggtgaactacaagaacggccgggagatcgagctgtacgaggccctgaaggcccggctggaggcctacggcggcaacgccaagcaggccttcgaccccaaggacaaccccttctacaagaagggcggccagctggtgaaggccgtgcgggtggagaagacccaggagtccggcgtgctgctgaacaagaagaacgcctacaccatcgccgacaacggcgacatggtgcgggtggacgtgttctgcaaggtggacaagaagggcaagaaccagtacttcatcgtgcccatctacgcctggcaggtggccgagaacatcctgcccgacatcgactgcaagggctaccggatcgacgactcctacaccttctgcttctccctgcacaagtacgacctgatcgccttccagaaggacgagaagtccaaggtggagttcgcctactacatcaactgcgactcctccaacggccggttctacctggcctggcacgacaagggctccaaggagcagcagttccggatctccacccagaacctggtgctgatccagaagtaccaggtgaacgagctgggcaaggagatccggccctgccggctgaagaagcggccccccgtgcggtccggaaagcggaccgccgacggctccggaggaggaagcccgaagaagaagagaaaggtcagcgaaagcgcaacaccggaaagcgtcagcggatggagactgttcaagaagatcagctag

SEQ ID NO: 70 - protein, 2520 aa, synthetic construct
  REGION 1..2520: note = Synthetic: Cas9-Cas9 fusion -31 amino acid residue linker and HiBit tag (mRNA S)-amino acid sequence
MDKKYSIGLDIGTNSVGWAVITDEYKVPSKKFKVLGNTDRHSIKKNLIGALLFDSGETAEATRLKRTARRRYTRRKNRICYLQEIFSNEMAKVDDSFFHRLEESFLVEEDKKHERHPIFGNIVDEVAYHEKYPTIYHLRKKLVDSTDKADLRLIYLALAHMIKFRGHFLIEGDLNPDNSDVDKLFIQLVQTYNQLFEENPINASGVDAKAILSARLSKSRRLENLIAQLPGEKKNGLFGNLIALSLGLTPNFKSNFDLAEDAKLQLSKDTYDDDLDNLLAQIGDQYADLFLAAKNLSDAILLSDILRVNTEITKAPLSASMIKRYDEHHQDLTLLKALVRQQLPEKYKEIFFDQSKNGYAGYIDGGASQEEFYKFIKPILEKMDGTEELLVKLNREDLLRKQRTFDNGSIPHQIHLGELHAILRRQEDFYPFLKDNREKIEKILTFRIPYYVGPLARGNSRFAWMTRKSEETITPWNFEEVVDKGASAQSFIERMTNFDKNLPNEKVLPKHSLLYEYFTVYNELTKVKYVTEGMRKPAFLSGEQKKAIVDLLFKTNRKVTVKQLKEDYFKKIECFDSVEISGVEDRFNASLGTYHDLLKIIKDKDFLDNEENEDILEDIVLTLTLFEDREMIEERLKTYAHLFDDKVMKQLKRRRYTGWGRLSRKLINGIRDKQSGKTILDFLKSDGFANRNFMQLIHDDSLTFKEDIQKAQVSGQGDSLHEHIANLAGSPAIKKGILQTVKVVDELVKVMGRHKPENIVIEMARENQTTQKGQKNSRERMKRIEEGIKELGSQILKEHPVENTQLQNEKLYLYYLQNGRDMYVDQELDINRLSDYDVDHIVPQSFLKDDSIDNKVLTRSDKNRGKSDNVPSEEVVKKMKNYWRQLLNAKLITQRKFDNLTKAERGGLSELDKAGFIKRQLVETRQITKHVAQILDSRMNTKYDENDKLIREVKVITLKSKLVSDFRKDFQFYKVREINNYHHAHDAYLNAVVGTALIKKYPKLESEFVYGDYKVYDVRKMIAKSEQEIGKATAKYFFYSNIMNFFKTEITLANGEIRKRPLIETNGETGEIVWDKGRDFATVRKVLSMPQVNIVKKTEVQTGGFSKESILPKRNSDKLIARKKDWDPKKYGGFDSPTVAYSVLVVAKVEKGKSKKLKSVKELLGITIMERSSFEKNPIDFLEAKGYKEVKKDLIIKLPKYSLFELENGRKRMLASAGELQKGNELALPSKYVNFLYLASHYEKLKGSPEDNEQKQLFVEQHKHYLDEIIEQISEFSKRVILADANLDKVLSAYNKHRDKPIREQAENIIHLFTLTNLGAPAAFKYFDTTIDKKRYTSTKEVLDATLIHQSITGLYETRIDLSQLGGDGAPESATESGGTSTESEGSAGTSTESEGSSSGAAFKPNPINYILGLDIGIASVGWAMVEIDEEENPIRLIDLGVRVFERAEVPKTGDSLAMARRLARSVRRLTRRRAHRLLRARRLLKREGVLQAADFDENGLIKSLPNTPWQLRAAALDRKLTPLEWSAVLLHLIKHRGYLSQRKNEGETADKELGALLKGVANNAHALQTGDFRTPAELALNKFEKESGHIRNQRGDYSHTFSRKDLQAELILLFEKQKEFGNPHVSGGLKEGIETLLMTQRPALSGDAVQKMLGHCTFEPAEPKAAKNTYTAERFIWLTKLNNLRILEQGSERPLTDTERATLMDEPYRKSKLTYAQARKLLGLEDTAFFKGLRYGKDNAEASTLMEMKAYHAISRALEKEGLKDKKSPLNLSSELQDEIGTAFSLFKTDEDITGRLKDRVQPEILEALLKHISFDKFVQISLKALRRIVPLMEQGKRYDEACAEIYGDHYGKKNTEEKIYLPPIPADEIRNPVVLRALSQARKVINGVVRRYGSPARIHIETAREVGKSFKDRKEIEKRQEENRKDREKAAAKFREYFPNFVGEPKSKDILKLRLYEQQHGKCLYSGKEINLVRLNEKGYVEIDHALPFSRTWDDSFNNKVLVLGSENQNKGNQTPYEYFNGKDNSREWQEFKARVETSRFPRSKKQRILLQKFDEDGFKECNLNDTRYVNRFLCQFVADHILLTGKGKRRVFASNGQITNLLRGFWGLRKVRAENDRHHALDAVVVACSTVAMQQKITRFVRYKEMNAFDGKTIDKETGKVLHQKTHFPQPWEFFAQEVMIRVFGKPDGKPEFEEADTPEKLRTLLAEKLSSRPEAVHEYVTPLFVSRAPNRKMSGAHKDTLRSAKRFVKHNEKISVKRVWLTEIKLADLENMVNYKNGREIELYEALKARLEAYGGNAKQAFDPKDNPFYKKGGQLVKAVRVEKTQESGVLLNKKNAYTIADNGDMVRVDVFCKVDKKGKNQYFIVPIYAWQVAENILPDIDCKGYRIDDSYTFCFSLHKYDLIAFQKDEKSKVEFAYYINCDSSNGRFYLAWHDKGSKEQQFRISTQNLVLIQKYQVNELGKEIRPCRLKKRPPVRSGKRTADGSGGGSPKKKRKVSESATPESVSGWRLFKKIS

SEQ ID NO: 71 - RNA, 7506 nt, synthetic construct
  misc_feature 1..7506: note = Synthetic: Cas9-Cas9 fusion -31 amino acid residual linker (mRNA S)-mRNA sequence
  source 1..7506: mol_type = other RNA
atggacaagaagtactccatcggcctggacatcggcaccaactccgtgggctgggccgtgatcaccgacgagtacaaggtgccctccaagaagttcaaggtgctgggcaacaccgaccggcactccatcaagaagaacctgatcggcgccctgctgttcgactccggcgagaccgccgaggccacccggctgaagcggaccgcccggcggcggtacacccggcggaagaaccggatctgctacctgcaggagatcttctccaacgagatggccaaggtggacgactccttcttccaccggctggaggagtccttcctggtggaggaggacaagaagcacgagcggcaccccatcttcggcaacatcgtggacgaggtggcctaccacgagaagtaccccaccatctaccacctgcggaagaagctggtggactccaccgacaaggccgacctgcggctgatctacctggccctggcccacatgatcaagttccggggccacttcctgatcgagggcgacctgaaccccgacaactccgacgtggacaagctgttcatccagctggtgcagacctacaaccagctgttcgaggagaaccccatcaacgcctccggcgtggacgccaaggccatcctgtccgcccggctgtccaagtcccggcggctggagaacctgatcgcccagctgcccggcgagaagaagaacggcctgttcggcaacctgatcgccctgtccctgggcctgacccccaacttcaagtccaacttcgacctggccgaggacgccaagctgcagctgtccaaggacacctacgacgacgacctggacaacctgctggcccagatcggcgaccagtacgccgacctgttcctggccgccaagaacctgtccgacgccatcctgctgtccgacatcctgcgggtgaacaccgagatcaccaaggcccccctgtccgcctccatgatcaagcggtacgacgagcaccaccaggacctgaccctgctgaaggccctggtgcggcagcagctgcccgagaagtacaaggagatcttcttcgaccagtccaagaacggctacgccggctacatcgacggcggcgcctcccaggaggagttctacaagttcatcaagcccatcctggagaagatggacggcaccgaggagctgctggtgaagctgaaccgggaggacctgctgcggaagcagcggaccttcgacaacggctccatcccccaccagatccacctgggcgagctgcacgccatcctgcggcggcaggaggacttctaccccttcctgaaggacaaccgggagaagatcgagaagatcctgaccttccggatcccctactacgtgggccccctggcccggggcaactcccggttcgcctggatgacccggaagtccgaggagaccatcaccccctggaacttcgaggaggtggtggacaagggcgcctccgcccagtccttcatcgagcggatgaccaacttcgacaagaacctgcccaacgagaaggtgctgcccaagcactccctgctgtacgagtacttcaccgtgtacaacgagctgaccaaggtgaagtacgtgaccgagggcatgcggaagcccgccttcctgtccggcgagcagaagaaggccatcgtggacctgctgttcaagaccaaccggaaggtgaccgtgaagcagctgaaggaggactacttcaagaagatcgagtgcttcgactccgtggagatctccggcgtggaggaccggttcaacgcctccctgggcacctaccacgacctgctgaagatcatcaaggacaaggacttcctggacaacgaggagaacgaggacatcctggaggacatcgtgctgaccctgaccctgttcgaggaccgggagatgatcgaggagcggctgaagacctacgcccacctgttcgacgacaaggtgatgaagcagctgaagcggcggcggtacaccggctggggccggctgtcccggaagctgatcaacggcatccgggacaagcagtccggcaagaccatcctggacttcctgaagtccgacggcttcgccaaccggaacttcatgcagctgatccacgacgactccctgaccttcaaggaggacatccagaaggcccaggtgtccggccagggcgactccctgcacgagcacatcgccaacctggccggctcccccgccatcaagaagggcatcctgcagaccgtgaaggtggtggacgagctggtgaaggtgatgggccggcacaagcccgagaacatcgtgatcgagatggcccgggagaaccagaccacccagaagggccagaagaactcccgggagcggatgaagcggatcgaggagggcatcaaggagctgggctcccagatcctgaaggagcaccccgtggagaacacccagctgcagaacgagaagctgtacctgtactacctgcagaacggccgggacatgtacgtggaccaggagctggacatcaaccggctgtccgactacgacgtggaccacatcgtgccccagtccttcctgaaggacgactccatcgacaacaaggtgctgacccggtccgacaagaaccggggcaagtccgacaacgtgccctccgaggaggtggtgaagaagatgaagaactactggcggcagctgctgaacgccaagctgatcacccagcggaagttcgacaacctgaccaaggccgagcggggcggcctgtccgagctggacaaggccggcttcatcaagcggcagctggtggagacccggcagatcaccaagcacgtggcccagatcctggactcccggatgaacaccaagtacgacgagaacgacaagctgatccgggaggtgaaggtgatcaccctgaagtccaagctggtgtccgacttccggaaggacttccagttctacaaggtgcgggagatcaacaactaccaccacgcccacgacgcctacctgaacgccgtggtgggcaccgccctgatcaagaagtaccccaagctggagtccgagttcgtgtacggcgactacaaggtgtacgacgtgcggaagatgatcgccaagtccgagcaggagatcggcaaggccaccgccaagtacttcttctactccaacatcatgaacttcttcaagaccgagatcaccctggccaacggcgagatccggaagcggcccctgatcgagaccaacggcgagaccggcgagatcgtgtgggacaagggccgggacttcgccaccgtgcggaaggtgctgtccatgccccaggtgaacatcgtgaagaagaccgaggtgcagaccggcggcttctccaaggagtccatcctgcccaagcggaactccgacaagctgatcgcccggaagaaggactgggaccccaagaagtacggcggcttcgactcccccaccgtggcctactccgtgctggtggtggccaaggtggagaagggcaagtccaagaagctgaagtccgtgaaggagctgctgggcatcaccatcatggagcggtcctccttcgagaagaaccccatcgacttcctggaggccaagggctacaaggaggtgaagaaggacctgatcatcaagctgcccaagtactccctgttcgagctggagaacggccggaagcggatgctggcctccgccggcgagctgcagaagggcaacgagctggccctgccctccaagtacgtgaacttcctgtacctggcctcccactacgagaagctgaagggctcccccgaggacaacgagcagaagcagctgttcgtggagcagcacaagcactacctggacgagatcatcgagcagatctccgagttctccaagcgggtgatcctggccgacgccaacctggacaaggtgctgtccgcctacaacaagcaccgggacaagcccatccgggagcaggccgagaacatcatccacctgttcaccctgaccaacctgggcgcccccgccgccttcaagtacttcgacaccaccatcgacaagaagcggtacacctccaccaaggaggtgctggacgccaccctgatccaccagtccatcaccggcctgtacgagacccggatcgacctgtcccagctgggcggcgacggcgcccccgagtccgccaccgagtccggcggcacctccaccgagtccgagggctccgccggcacctccaccgagtccgagggctcctcctccggtgccgccttcaagcccaaccccatcaactacatcctgggcctggacatcggcatcgcctccgtgggctgggccatggtggagatcgacgaggaggagaaccccatccggctgatcgacctgggcgtgcgggtgttcgagcgggccgaggtgcccaagaccggcgactccctggccatggcccggcggctggcccggtccgtgcggcggctgacccggcggcgggcccaccggctgctgcgggcccggcggctgctgaagcgggagggcgtgctgcaggccgccgacttcgacgagaacggcctgatcaagtccctgcccaacaccccctggcagctgcgggccgccgccctggaccggaagctgacccccctggagtggtccgccgtgctgctgcacctgatcaagcaccggggctacctgtcccagcggaagaacgagggcgagaccgccgacaaggagctgggcgccctgctgaagggcgtggccaacaacgcccacgccctgcagaccggcgacttccggacccccgccgagctggccctgaacaagttcgagaaggagtccggccacatccggaaccagcggggcgactactcccacaccttctcccggaaggacctgcaggccgagctgatcctgctgttcgagaagcagaaggagttcggcaacccccacgtgtccggcggcctgaaggagggcatcgagaccctgctgatgacccagcggcccgccctgtccggcgacgccgtgcagaagatgctgggccactgcaccttcgagcccgccgagcccaaggccgccaagaacacctacaccgccgagcggttcatctggctgaccaagctgaacaacctgcggatcctggagcagggctccgagcggcccctgaccgacaccgagcgggccaccctgatggacgagccctaccggaagtccaagctgacctacgcccaggcccggaagctgctgggcctggaggacaccgccttcttcaagggcctgcggtacggcaaggacaacgccgaggcctccaccctgatggagatgaaggcctaccacgccatctcccgggccctggagaaggagggcctgaaggacaagaagtcccccctgaacctgtcctccgagctgcaggacgagatcggcaccgccttctccctgttcaagaccgacgaggacatcaccggccggctgaaggaccgggtgcagcccgagatcctggaggccctgctgaagcacatctccttcgacaagttcgtgcagatctccctgaaggccctgcggcggatcgtgcccctgatggagcagggcaagcggtacgacgaggcctgcgccgagatctacggcgaccactacggcaagaagaacaccgaggagaagatctacctgccccccatccccgccgacgagatccggaaccccgtggtgctgcgggccctgtcccaggcccggaaggtgatcaacggcgtggtgcggcggtacggctcccccgcccggatccacatcgagaccgcccgggaggtgggcaagtccttcaaggaccggaaggagatcgagaagcggcaggaggagaaccggaaggaccgggagaaggccgccgccaagttccgggagtacttccccaacttcgtgggcgagcccaagtccaaggacatcctgaagctgcggctgtacgagcagcagcacggcaagtgcctgtactccggcaaggagatcaacctggtgcggctgaacgagaagggctacgtggagatcgaccacgccctgcccttctcccggacctgggacgactccttcaacaacaaggtgctggtgctgggctccgagaaccagaacaagggcaaccagaccccctacgagtacttcaacggcaaggacaactcccgggagtggcaggagttcaaggcccgggtggagacctcccggttcccccggtccaagaagcagcggatcctgctgcagaagttcgacgaggacggcttcaaggagtgcaacctgaacgacacccggtacgtgaaccgcttcctgtgccagttcgtggccgaccacatcctgctgaccggcaagggcaagcggcgggtgttcgcctccaacggccagatcaccaacctgctgcggggcttctggggcctgcggaaggtgcgggccgagaacgaccggcaccacgccctggacgccgtggtggtggcctgctccaccgtggccatgcagcagaagatcacccggttcgtgcggtacaaggagatgaacgccttcgacggcaagaccatcgacaaggagaccggcaaggtgctgcaccagaagacccacttcccccagccctgggagttcttcgcccaggaggtgatgatccgggtgttcggcaagcccgacggcaagcccgagttcgaggaggccgacacccccgagaagctgcggaccctgctggccgagaagctgtcctcccggcccgaggccgtgcacgagtacgtgacccccctgttcgtgtcccgggcccccaaccggaagatgtccggcgcccacaaggacaccctgcggtccgccaagcggttcgtgaagcacaacgagaagatctccgtgaagcgggtgtggctgaccgagatcaagctggccgacctggagaacatggtgaactacaagaacggccgggagatcgagctgtacgaggccctgaaggcccggctggaggcctacggcggcaacgccaagcaggccttcgaccccaaggacaaccccttctacaagaagggcggccagctggtgaaggccgtgcgggtggagaagacccaggagtccggcgtgctgctgaacaagaagaacgcctacaccatcgccgacaacggcgacatggtgcgggtggacgtgttctgcaaggtggacaagaagggcaagaaccagtacttcatcgtgcccatctacgcctggcaggtggccgagaacatcctgcccgacatcgactgcaagggctaccggatcgacgactcctacaccttctgcttctccctgcacaagtacgacctgatcgccttccagaaggacgagaagtccaaggtggagttcgcctactacatcaactgcgactcctccaacggccggttctacctggcctggcacgacaagggctccaaggagcagcagttccggatctccacccagaacctggtgctgatccagaagtaccaggtgaacgagctgggcaaggagatccggccctgccggctgaagaagcggccccccgtgcggtccggaaagcggaccgccgacggctccggaggaggaagcccgaagaagaagagaaaggtctag

SEQ ID NO: 72 - protein, 2501 aa, synthetic construct
  REGION 1..2501: note = Synthetic: Cas9-Cas9 fusion -31 amino acid residual linker (mRNA S)-amino acid sequence
MDKKYSIGLDIGTNSVGWAVITDEYKVPSKKFKVLGNTDRHSIKKNLIGALLFDSGETAEATRLKRTARRRYTRRKNRICYLQEIFSNEMAKVDDSFFHRLEESFLVEEDKKHERHPIFGNIVDEVAYHEKYPTIYHLRKKLVDSTDKADLRLIYLALAHMIKFRGHFLIEGDLNPDNSDVDKLFIQLVQTYNQLFEENPINASGVDAKAILSARLSKSRRLENLIAQLPGEKKNGLFGNLIALSLGLTPNFKSNFDLAEDAKLQLSKDTYDDDLDNLLAQIGDQYADLFLAAKNLSDAILLSDILRVNTEITKAPLSASMIKRYDEHHQDLTLLKALVRQQLPEKYKEIFFDQSKNGYAGYIDGGASQEEFYKFIKPILEKMDGTEELLVKLNREDLLRKQRTFDNGSIPHQIHLGELHAILRRQEDFYPFLKDNREKIEKILTFRIPYYVGPLARGNSRFAWMTRKSEETITPWNFEEVVDKGASAQSFIERMTNFDKNLPNEKVLPKHSLLYEYFTVYNELTKVKYVTEGMRKPAFLSGEQKKAIVDLLFKTNRKVTVKQLKEDYFKKIECFDSVEISGVEDRFNASLGTYHDLLKIIKDKDFLDNEENEDILEDIVLTLTLFEDREMIEERLKTYAHLFDDKVMKQLKRRRYTGWGRLSRKLINGIRDKQSGKTILDFLKSDGFANRNFMQLIHDDSLTFKEDIQKAQVSGQGDSLHEHIANLAGSPAIKKGILQTVKVVDELVKVMGRHKPENIVIEMARENQTTQKGQKNSRERMKRIEEGIKELGSQILKEHPVENTQLQNEKLYLYYLQNGRDMYVDQELDINRLSDYDVDHIVPQSFLKDDSIDNKVLTRSDKNRGKSDNVPSEEVVKKMKNYWRQLLNAKLITQRKFDNLTKAERGGLSELDKAGFIKRQLVETRQITKHVAQILDSRMNTKYDENDKLIREVKVITLKSKLVSDFRKDFQFYKVREINNYHHAHDAYLNAVVGTALIKKYPKLESEFVYGDYKVYDVRKMIAKSEQEIGKATAKYFFYSNIMNFFKTEITLANGEIRKRPLIETNGETGEIVWDKGRDFATVRKVLSMPQVNIVKKTEVQTGGFSKESILPKRNSDKLIARKKDWDPKKYGGFDSPTVAYSVLVVAKVEKGKSKKLKSVKELLGITIMERSSFEKNPIDFLEAKGYKEVKKDLIIKLPKYSLFELENGRKRMLASAGELQKGNELALPSKYVNFLYLASHYEKLKGSPEDNEQKQLFVEQHKHYLDEIIEQISEFSKRVILADANLDKVLSAYNKHRDKPIREQAENIIHLFTLTNLGAPAAFKYFDTTIDKKRYTSTKEVLDATLIHQSITGLYETRIDLSQLGGDGAPESATESGGTSTESEGSAGTSTESEGSSSGAAFKPNPINYILGLDIGIASVGWAMVEIDEEENPIRLIDLGVRVFERAEVPKTGDSLAMARRLARSVRRLTRRRAHRLLRARRLLKREGVLQAADFDENGLIKSLPNTPWQLRAAALDRKLTPLEWSAVLLHLIKHRGYLSQRKNEGETADKELGALLKGVANNAHALQTGDFRTPAELALNKFEKESGHIRNQRGDYSHTFSRKDLQAELILLFEKQKEFGNPHVSGGLKEGIETLLMTQRPALSGDAVQKMLGHCTFEPAEPKAAKNTYTAERFIWLTKLNNLRILEQGSERPLTDTERATLMDEPYRKSKLTYAQARKLLGLEDTAFFKGLRYGKDNAEASTLMEMKAYHAISRALEKEGLKDKKSPLNLSSELQDEIGTAFSLFKTDEDITGRLKDRVQPEILEALLKHISFDKFVQISLKALRRIVPLMEQGKRYDEACAEIYGDHYGKKNTEEKIYLPPIPADEIRNPVVLRALSQARKVINGVVRRYGSPARIHIETAREVGKSFKDRKEIEKRQEENRKDREKAAAKFREYFPNFVGEPKSKDILKLRLYEQQHGKCLYSGKEINLVRLNEKGYVEIDHALPFSRTWDDSFNNKVLVLGSENQNKGNQTPYEYFNGKDNSREWQEFKARVETSRFPRSKKQRILLQKFDEDGFKECNLNDTRYVNRFLCQFVADHILLTGKGKRRVFASNGQITNLLRGFWGLRKVRAENDRHHALDAVVVACSTVAMQQKITRFVRYKEMNAFDGKTIDKETGKVLHQKTHFPQPWEFFAQEVMIRVFGKPDGKPEFEEADTPEKLRTLLAEKLSSRPEAVHEYVTPLFVSRAPNRKMSGAHKDTLRSAKRFVKHNEKISVKRVWLTEIKLADLENMVNYKNGREIELYEALKARLEAYGGNAKQAFDPKDNPFYKKGGQLVKAVRVEKTQESGVLLNKKNAYTIADNGDMVRVDVFCKVDKKGKNQYFIVPIYAWQVAENILPDIDCKGYRIDDSYTFCFSLHKYDLIAFQKDEKSKVEFAYYINCDSSNGRFYLAWHDKGSKEQQFRISTQNLVLIQKYQVNELGKEIRPCRLKKRPPVRSGKRTADGSGGGSPKKKRKV

SEQ ID NO: 73 - RNA, 8093 nt, synthetic construct
  misc_feature 1..8093: note = Synthetic: Cas9-Cas9 fusion -21 amino acid residue linker and HiBit tag (mRNA T)-mRNA sequence
  source 1..8093: mol_type = other RNA
gggaagctcagaataaacgctcaactttggccggatctgccaccatggacaagaagtactccatcggcctggacatcggcaccaactccgtgggctgggccgtgatcaccgacgagtacaaggtgccctccaagaagttcaaggtgctgggcaacaccgaccggcactccatcaagaagaacctgatcggcgccctgctgttcgactccggcgagaccgccgaggccacccggctgaagcggaccgcccggcggcggtacacccggcggaagaaccggatctgctacctgcaggagatcttctccaacgagatggccaaggtggacgactccttcttccaccggctggaggagtccttcctggtggaggaggacaagaagcacgagcggcaccccatcttcggcaacatcgtggacgaggtggcctaccacgagaagtaccccaccatctaccacctgcggaagaagctggtggactccaccgacaaggccgacctgcggctgatctacctggccctggcccacatgatcaagttccggggccacttcctgatcgagggcgacctgaaccccgacaactccgacgtggacaagctgttcatccagctggtgcagacctacaaccagctgttcgaggagaaccccatcaacgcctccggcgtggacgccaaggccatcctgtccgcccggctgtccaagtcccggcggctggagaacctgatcgcccagctgcccggcgagaagaagaacggcctgttcggcaacctgatcgccctgtccctgggcctgacccccaacttcaagtccaacttcgacctggccgaggacgccaagctgcagctgtccaaggacacctacgacgacgacctggacaacctgctggcccagatcggcgaccagtacgccgacctgttcctggccgccaagaacctgtccgacgccatcctgctgtccgacatcctgcgggtgaacaccgagatcaccaaggcccccctgtccgcctccatgatcaagcggtacgacgagcaccaccaggacctgaccctgctgaaggccctggtgcggcagcagctgcccgagaagtacaaggagatcttcttcgaccagtccaagaacggctacgccggctacatcgacggcggcgcctcccaggaggagttctacaagttcatcaagcccatcctggagaagatggacggcaccgaggagctgctggtgaagctgaaccgggaggacctgctgcggaagcagcggaccttcgacaacggctccatcccccaccagatccacctgggcgagctgcacgccatcctgcggcggcaggaggacttctaccccttcctgaaggacaaccgggagaagatcgagaagatcctgaccttccggatcccctactacgtgggccccctggcccggggcaactcccggttcgcctggatgacccggaagtccgaggagaccatcaccccctggaacttcgaggaggtggtggacaagggcgcctccgcccagtccttcatcgagcggatgaccaacttcgacaagaacctgcccaacgagaaggtgctgcccaagcactccctgctgtacgagtacttcaccgtgtacaacgagctgaccaaggtgaagtacgtgaccgagggcatgcggaagcccgccttcctgtccggcgagcagaagaaggccatcgtggacctgctgttcaagaccaaccggaaggtgaccgtgaagcagctgaaggaggactacttcaagaagatcgagtgcttcgactccgtggagatctccggcgtggaggaccggttcaacgcctccctgggcacctaccacgacctgctgaagatcatcaaggacaaggacttcctggacaacgaggagaacgaggacatcctggaggacatcgtgctgaccctgaccctgttcgaggaccgggagatgatcgaggagcggctgaagacctacgcccacctgttcgacgacaaggtgatgaagcagctgaagcggcggcggtacaccggctggggccggctgtcccggaagctgatcaacggcatccgggacaagcagtccggcaagaccatcctggacttcctgaagtccgacggcttcgccaaccggaacttcatgcagctgatccacgacgactccctgaccttcaaggaggacatccagaaggcccaggtgtccggccagggcgactccctgcacgagcacatcgccaacctggccggctcccccgccatcaagaagggcatcctgcagaccgtgaaggtggtggacgagctggtgaaggtgatgggccggcacaagcccgagaacatcgtgatcgagatggcccgggagaaccagaccacccagaagggccagaagaactcccgggagcggatgaagcggatcgaggagggcatcaaggagctgggctcccagatcctgaaggagcaccccgtggagaacacccagctgcagaacgagaagctgtacctgtactacctgcagaacggccgggacatgtacgtggaccaggagctggacatcaaccggctgtccgactacgacgtggaccacatcgtgccccagtccttcctgaaggacgactccatcgacaacaaggtgctgacccggtccgacaagaaccggggcaagtccgacaacgtgccctccgaggaggtggtgaagaagatgaagaactactggcggcagctgctgaacgccaagctgatcacccagcggaagttcgacaacctgaccaaggccgagcggggcggcctgtccgagctggacaaggccggcttcatcaagcggcagctggtggagacccggcagatcaccaagcacgtggcccagatcctggactcccggatgaacaccaagtacgacgagaacgacaagctgatccgggaggtgaaggtgatcaccctgaagtccaagctggtgtccgacttccggaaggacttccagttctacaaggtgcgggagatcaacaactaccaccacgcccacgacgcctacctgaacgccgtggtgggcaccgccctgatcaagaagtaccccaagctggagtccgagttcgtgtacggcgactacaaggtgtacgacgtgcggaagatgatcgccaagtccgagcaggagatcggcaaggccaccgccaagtacttcttctactccaacatcatgaacttcttcaagaccgagatcaccctggccaacggcgagatccggaagcggcccctgatcgagaccaacggcgagaccggcgagatcgtgtgggacaagggccgggacttcgccaccgtgcggaaggtgctgtccatgccccaggtgaacatcgtgaagaagaccgaggtgcagaccggcggcttctccaaggagtccatcctgcccaagcggaactccgacaagctgatcgcccggaagaaggactgggaccccaagaagtacggcggcttcgactcccccaccgtggcctactccgtgctggtggtggccaaggtggagaagggcaagtccaagaagctgaagtccgtgaaggagctgctgggcatcaccatcatggagcggtcctccttcgagaagaaccccatcgacttcctggaggccaagggctacaaggaggtgaagaaggacctgatcatcaagctgcccaagtactccctgttcgagctggagaacggccggaagcggatgctggcctccgccggcgagctgcagaagggcaacgagctggccctgccctccaagtacgtgaacttcctgtacctggcctcccactacgagaagctgaagggctcccccgaggacaacgagcagaagcagctgttcgtggagcagcacaagcactacctggacgagatcatcgagcagatctccgagttctccaagcgggtgatcctggccgacgccaacctggacaaggtgctgtccgcctacaacaagcaccgggacaagcccatccgggagcaggccgagaacatcatccacctgttcaccctgaccaacctgggcgcccccgccgccttcaagtacttcgacaccaccatcgacaagaagcggtacacctccaccaaggaggtgctggacgccaccctgatccaccagtccatcaccggcctgtacgagacccggatcgacctgtcccagctgggcggcgacggcgcccccgagtccgccaccgagtccggcggcacctccaccgagtccgagggctcctcctccggtgccgccttcaagcccaaccccatcaactacatcctgggcctggacatcggcatcgcctccgtgggctgggccatggtggagatcgacgaggaggagaaccccatccggctgatcgacctgggcgtgcgggtgttcgagcgggccgaggtgcccaagaccggcgactccctggccatggcccggcggctggcccggtccgtgcggcggctgacccggcggcgggcccaccggctgctgcgggcccggcggctgctgaagcgggagggcgtgctgcaggccgccgacttcgacgagaacggcctgatcaagtccctgcccaacaccccctggcagctgcgggccgccgccctggaccggaagctgacccccctggagtggtccgccgtgctgctgcacctgatcaagcaccggggctacctgtcccagcggaagaacgagggcgagaccgccgacaaggagctgggcgccctgctgaagggcgtggccaacaacgcccacgccctgcagaccggcgacttccggacccccgccgagctggccctgaacaagttcgagaaggagtccggccacatccggaaccagcggggcgactactcccacaccttctcccggaaggacctgcaggccgagctgatcctgctgttcgagaagcagaaggagttcggcaacccccacgtgtccggcggcctgaaggagggcatcgagaccctgctgatgacccagcggcccgccctgtccggcgacgccgtgcagaagatgctgggccactgcaccttcgagcccgccgagcccaaggccgccaagaacacctacaccgccgagcggttcatctggctgaccaagctgaacaacctgcggatcctggagcagggctccgagcggcccctgaccgacaccgagcgggccaccctgatggacgagccctaccggaagtccaagctgacctacgcccaggcccggaagctgctgggcctggaggacaccgccttcttcaagggcctgcggtacggcaaggacaacgccgaggcctccaccctgatggagatgaaggcctaccacgccatctcccgggccctggagaaggagggcctgaaggacaagaagtcccccctgaacctgtcctccgagctgcaggacgagatcggcaccgccttctccctgttcaagaccgacgaggacatcaccggccggctgaaggaccgggtgcagcccgagatcctggaggccctgctgaagcacatctccttcgacaagttcgtgcagatctccctgaaggccctgcggcggatcgtgcccctgatggagcagggcaagcggtacgacgaggcctgcgccgagatctacggcgaccactacggcaagaagaacaccgaggagaagatctacctgccccccatccccgccgacgagatccggaaccccgtggtgctgcgggccctgtcccaggcccggaaggtgatcaacggcgtggtgcggcggtacggctcccccgcccggatccacatcgagaccgcccgggaggtgggcaagtccttcaaggaccggaaggagatcgagaagcggcaggaggagaaccggaaggaccgggagaaggccgccgccaagttccgggagtacttccccaacttcgtgggcgagcccaagtccaaggacatcctgaagctgcggctgtacgagcagcagcacggcaagtgcctgtactccggcaaggagatcaacctggtgcggctgaacgagaagggctacgtggagatcgaccacgccctgcccttctcccggacctgggacgactccttcaacaacaaggtgctggtgctgggctccgagaaccagaacaagggcaaccagaccccctacgagtacttcaacggcaaggacaactcccgggagtggcaggagttcaaggcccgggtggagacctcccggttcccccggtccaagaagcagcggatcctgctgcagaagttcgacgaggacggcttcaaggagtgcaacctgaacgacacccggtacgtgaaccgcttcctgtgccagttcgtggccgaccacatcctgctgaccggcaagggcaagcggcgggtgttcgcctccaacggccagatcaccaacctgctgcggggcttctggggcctgcggaaggtgcgggccgagaacgaccggcaccacgccctggacgccgtggtggtggcctgctccaccgtggccatgcagcagaagatcacccggttcgtgcggtacaaggagatgaacgccttcgacggcaagaccatcgacaaggagaccggcaaggtgctgcaccagaagacccacttcccccagccctgggagttcttcgcccaggaggtgatgatccgggtgttcggcaagcccgacggcaagcccgagttcgaggaggccgacacccccgagaagctgcggaccctgctggccgagaagctgtcctcccggcccgaggccgtgcacgagtacgtgacccccctgttcgtgtcccgggcccccaaccggaagatgtccggcgcccacaaggacaccctgcggtccgccaagcggttcgtgaagcacaacgagaagatctccgtgaagcgggtgtggctgaccgagatcaagctggccgacctggagaacatggtgaactacaagaacggccgggagatcgagctgtacgaggccctgaaggcccggctggaggcctacggcggcaacgccaagcaggccttcgaccccaaggacaaccccttctacaagaagggcggccagctggtgaaggccgtgcgggtggagaagacccaggagtccggcgtgctgctgaacaagaagaacgcctacaccatcgccgacaacggcgacatggtgcgggtggacgtgttctgcaaggtggacaagaagggcaagaaccagtacttcatcgtgcccatctacgcctggcaggtggccgagaacatcctgcccgacatcgactgcaagggctaccggatcgacgactcctacaccttctgcttctccctgcacaagtacgacctgatcgccttccagaaggacgagaagtccaaggtggagttcgcctactacatcaactgcgactcctccaacggccggttctacctggcctggcacgacaagggctccaaggagcagcagttccggatctccacccagaacctggtgctgatccagaagtaccaggtgaacgagctgggcaaggagatccggccctgccggctgaagaagcggccccccgtgcggtccggaaagcggaccgccgacggctccggaggaggaagcccgaagaagaagagaaaggtcagcgaaagcgcaacaccggaaagcgtcagcggatggagactgttcaagaagatcagctagctagcaccagcctcaagaacacccgaatggagtctctaagctacataataccaacttacactttacaaaatgttgtcccccaaaatgtagccattcgtatctgctcctaataaaaagaaagtttcttcacattctctcgagaaaaaaaaaaaatggaaaaaaaaaaaacggaaaaaaaaaaaaggtaaaaaaaaaaaatataaaaaaaaaaaacataaaaaaaaaaaacgaaaaaaaaaaaacgtaaaaaaaaaaaactcaaaaaaaaaaaagataaaaaaaaaaaacctaaaaaaaaaaaatgtaaaaaaaaaaaagggaaaaaaaaaaaacgcaaaaaaaaaaaacacaaaaaaaaaaaatgcaaaaaaaaaaaatcgaaaaaaaaaaaatctaaaaaaaaaaaacgaaaaaaaaaaaacccaaaaaaaaaaaagacaaaaaaaaaaaatagaaaaaaaaaaaagttaaaaaaaaaaaactgaaaaaaaaaaaatttaaaaaaaaaaaatctag

SEQ ID NO: 74 - RNA, 7533 nt, synthetic construct
  misc_feature 1..7533: note = Synthetic: Cas9-Cas9 fusion -21 amino acid residue linker and HiBit tag (mRNA T)-ORF sequence
  source 1..7533: mol_type = other RNA
atggacaagaagtactccatcggcctggacatcggcaccaactccgtgggctgggccgtgatcaccgacgagtacaaggtgccctccaagaagttcaaggtgctgggcaacaccgaccggcactccatcaagaagaacctgatcggcgccctgctgttcgactccggcgagaccgccgaggccacccggctgaagcggaccgcccggcggcggtacacccggcggaagaaccggatctgctacctgcaggagatcttctccaacgagatggccaaggtggacgactccttcttccaccggctggaggagtccttcctggtggaggaggacaagaagcacgagcggcaccccatcttcggcaacatcgtggacgaggtggcctaccacgagaagtaccccaccatctaccacctgcggaagaagctggtggactccaccgacaaggccgacctgcggctgatctacctggccctggcccacatgatcaagttccggggccacttcctgatcgagggcgacctgaaccccgacaactccgacgtggacaagctgttcatccagctggtgcagacctacaaccagctgttcgaggagaaccccatcaacgcctccggcgtggacgccaaggccatcctgtccgcccggctgtccaagtcccggcggctggagaacctgatcgcccagctgcccggcgagaagaagaacggcctgttcggcaacctgatcgccctgtccctgggcctgacccccaacttcaagtccaacttcgacctggccgaggacgccaagctgcagctgtccaaggacacctacgacgacgacctggacaacctgctggcccagatcggcgaccagtacgccgacctgttcctggccgccaagaacctgtccgacgccatcctgctgtccgacatcctgcgggtgaacaccgagatcaccaaggcccccctgtccgcctccatgatcaagcggtacgacgagcaccaccaggacctgaccctgctgaaggccctggtgcggcagcagctgcccgagaagtacaaggagatcttcttcgaccagtccaagaacggctacgccggctacatcgacggcggcgcctcccaggaggagttctacaagttcatcaagcccatcctggagaagatggacggcaccgaggagctgctggtgaagctgaaccgggaggacctgctgcggaagcagcggaccttcgacaacggctccatcccccaccagatccacctgggcgagctgcacgccatcctgcggcggcaggaggacttctaccccttcctgaaggacaaccgggagaagatcgagaagatcctgaccttccggatcccctactacgtgggccccctggcccggggcaactcccggttcgcctggatgacccggaagtccgaggagaccatcaccccctggaacttcgaggaggtggtggacaagggcgcctccgcccagtccttcatcgagcggatgaccaacttcgacaagaacctgcccaacgagaaggtgctgcccaagcactccctgctgtacgagtacttcaccgtgtacaacgagctgaccaaggtgaagtacgtgaccgagggcatgcggaagcccgccttcctgtccggcgagcagaagaaggccatcgtggacctgctgttcaagaccaaccggaaggtgaccgtgaagcagctgaaggaggactacttcaagaagatcgagtgcttcgactccgtggagatctccggcgtggaggaccggttcaacgcctccctgggcacctaccacgacctgctgaagatcatcaaggacaaggacttcctggacaacgaggagaacgaggacatcctggaggacatcgtgctgaccctgaccctgttcgaggaccgggagatgatcgaggagcggctgaagacctacgcccacctgttcgacgacaaggtgatgaagcagctgaagcggcggcggtacaccggctggggccggctgtcccggaagctgatcaacggcatccgggacaagcagtccggcaagaccatcctggacttcctgaagtccgacggcttcgccaaccggaacttcatgcagctgatccacgacgactccctgaccttcaaggaggacatccagaaggcccaggtgtccggccagggcgactccctgcacgagcacatcgccaacctggccggctcccccgccatcaagaagggcatcctgcagaccgtgaaggtggtggacgagctggtgaaggtgatgggccggcacaagcccgagaacatcgtgatcgagatggcccgggagaaccagaccacccagaagggccagaagaactcccgggagcggatgaagcggatcgaggagggcatcaaggagctgggctcccagatcctgaaggagcaccccgtggagaacacccagctgcagaacgagaagctgtacctgtactacctgcagaacggccgggacatgtacgtggaccaggagctggacatcaaccggctgtccgactacgacgtggaccacatcgtgccccagtccttcctgaaggacgactccatcgacaacaaggtgctgacccggtccgacaagaaccggggcaagtccgacaacgtgccctccgaggaggtggtgaagaagatgaagaactactggcggcagctgctgaacgccaagctgatcacccagcggaagttcgacaacctgaccaaggccgagcggggcggcctgtccgagctggacaaggccggcttcatcaagcggcagctggtggagacccggcagatcaccaagcacgtggcccagatcctggactcccggatgaacaccaagtacgacgagaacgacaagctgatccgggaggtgaaggtgatcaccctgaagtccaagctggtgtccgacttccggaaggacttccagttctacaaggtgcgggagatcaacaactaccaccacgcccacgacgcctacctgaacgccgtggtgggcaccgccctgatcaagaagtaccccaagctggagtccgagttcgtgtacggcgactacaaggtgtacgacgtgcggaagatgatcgccaagtccgagcaggagatcggcaaggccaccgccaagtacttcttctactccaacatcatgaacttcttcaagaccgagatcaccctggccaacggcgagatccggaagcggcccctgatcgagaccaacggcgagaccggcgagatcgtgtgggacaagggccgggacttcgccaccgtgcggaaggtgctgtccatgccccaggtgaacatcgtgaagaagaccgaggtgcagaccggcggcttctccaaggagtccatcctgcccaagcggaactccgacaagctgatcgcccggaagaaggactgggaccccaagaagtacggcggcttcgactcccccaccgtggcctactccgtgctggtggtggccaaggtggagaagggcaagtccaagaagctgaagtccgtgaaggagctgctgggcatcaccatcatggagcggtcctccttcgagaagaaccccatcgacttcctggaggccaagggctacaaggaggtgaagaaggacctgatcatcaagctgcccaagtactccctgttcgagctggagaacggccggaagcggatgctggcctccgccggcgagctgcagaagggcaacgagctggccctgccctccaagtacgtgaacttcctgtacctggcctcccactacgagaagctgaagggctcccccgaggacaacgagcagaagcagctgttcgtggagcagcacaagcactacctggacgagatcatcgagcagatctccgagttctccaagcgggtgatcctggccgacgccaacctggacaaggtgctgtccgcctacaacaagcaccgggacaagcccatccgggagcaggccgagaacatcatccacctgttcaccctgaccaacctgggcgcccccgccgccttcaagtacttcgacaccaccatcgacaagaagcggtacacctccaccaaggaggtgctggacgccaccctgatccaccagtccatcaccggcctgtacgagacccggatcgacctgtcccagctgggcggcgacggcgcccccgagtccgccaccgagtccggcggcacctccaccgagtccgagggctcctcctccggtgccgccttcaagcccaaccccatcaactacatcctgggcctggacatcggcatcgcctccgtgggctgggccatggtggagatcgacgaggaggagaaccccatccggctgatcgacctgggcgtgcgggtgttcgagcgggccgaggtgcccaagaccggcgactccctggccatggcccggcggctggcccggtccgtgcggcggctgacccggcggcgggcccaccggctgctgcgggcccggcggctgctgaagcgggagggcgtgctgcaggccgccgacttcgacgagaacggcctgatcaagtccctgcccaacaccccctggcagctgcgggccgccgccctggaccggaagctgacccccctggagtggtccgccgtgctgctgcacctgatcaagcaccggggctacctgtcccagcggaagaacgagggcgagaccgccgacaaggagctgggcgccctgctgaagggcgtggccaacaacgcccacgccctgcagaccggcgacttccggacccccgccgagctggccctgaacaagttcgagaaggagtccggccacatccggaaccagcggggcgactactcccacaccttctcccggaaggacctgcaggccgagctgatcctgctgttcgagaagcagaaggagttcggcaacccccacgtgtccggcggcctgaaggagggcatcgagaccctgctgatgacccagcggcccgccctgtccggcgacgccgtgcagaagatgctgggccactgcaccttcgagcccgccgagcccaaggccgccaagaacacctacaccgccgagcggttcatctggctgaccaagctgaacaacctgcggatcctggagcagggctccgagcggcccctgaccgacaccgagcgggccaccctgatggacgagccctaccggaagtccaagctgacctacgcccaggcccggaagctgctgggcctggaggacaccgccttcttcaagggcctgcggtacggcaaggacaacgccgaggcctccaccctgatggagatgaaggcctaccacgccatctcccgggccctggagaaggagggcctgaaggacaagaagtcccccctgaacctgtcctccgagctgcaggacgagatcggcaccgccttctccctgttcaagaccgacgaggacatcaccggccggctgaaggaccgggtgcagcccgagatcctggaggccctgctgaagcacatctccttcgacaagttcgtgcagatctccctgaaggccctgcggcggatcgtgcccctgatggagcagggcaagcggtacgacgaggcctgcgccgagatctacggcgaccactacggcaagaagaacaccgaggagaagatctacctgccccccatccccgccgacgagatccggaaccccgtggtgctgcgggccctgtcccaggcccggaaggtgatcaacggcgtggtgcggcggtacggctcccccgcccggatccacatcgagaccgcccgggaggtgggcaagtccttcaaggaccggaaggagatcgagaagcggcaggaggagaaccggaaggaccgggagaaggccgccgccaagttccgggagtacttccccaacttcgtgggcgagcccaagtccaaggacatcctgaagctgcggctgtacgagcagcagcacggcaagtgcctgtactccggcaaggagatcaacctggtgcggctgaacgagaagggctacgtggagatcgaccacgccctgcccttctcccggacctgggacgactccttcaacaacaaggtgctggtgctgggctccgagaaccagaacaagggcaaccagaccccctacgagtacttcaacggcaaggacaactcccgggagtggcaggagttcaaggcccgggtggagacctcccggttcccccggtccaagaagcagcggatcctgctgcagaagttcgacgaggacggcttcaaggagtgcaacctgaacgacacccggtacgtgaaccgcttcctgtgccagttcgtggccgaccacatcctgctgaccggcaagggcaagcggcgggtgttcgcctccaacggccagatcaccaacctgctgcggggcttctggggcctgcggaaggtgcgggccgagaacgaccggcaccacgccctggacgccgtggtggtggcctgctccaccgtggccatgcagcagaagatcacccggttcgtgcggtacaaggagatgaacgccttcgacggcaagaccatcgacaaggagaccggcaaggtgctgcaccagaagacccacttcccccagccctgggagttcttcgcccaggaggtgatgatccgggtgttcggcaagcccgacggcaagcccgagttcgaggaggccgacacccccgagaagctgcggaccctgctggccgagaagctgtcctcccggcccgaggccgtgcacgagtacgtgacccccctgttcgtgtcccgggcccccaaccggaagatgtccggcgcccacaaggacaccctgcggtccgccaagcggttcgtgaagcacaacgagaagatctccgtgaagcgggtgtggctgaccgagatcaagctggccgacctggagaacatggtgaactacaagaacggccgggagatcgagctgtacgaggccctgaaggcccggctggaggcctacggcggcaacgccaagcaggccttcgaccccaaggacaaccccttctacaagaagggcggccagctggtgaaggccgtgcgggtggagaagacccaggagtccggcgtgctgctgaacaagaagaacgcctacaccatcgccgacaacggcgacatggtgcgggtggacgtgttctgcaaggtggacaagaagggcaagaaccagtacttcatcgtgcccatctacgcctggcaggtggccgagaacatcctgcccgacatcgactgcaagggctaccggatcgacgactcctacaccttctgcttctccctgcacaagtacgacctgatcgccttccagaaggacgagaagtccaaggtggagttcgcctactacatcaactgcgactcctccaacggccggttctacctggcctggcacgacaagggctccaaggagcagcagttccggatctccacccagaacctggtgctgatccagaagtaccaggtgaacgagctgggcaaggagatccggccctgccggctgaagaagcggccccccgtgcggtccggaaagcggaccgccgacggctccggaggaggaagcccgaagaagaagagaaaggtcagcgaaagcgcaacaccggaaagcgtcagcggatggagactgttcaagaagatcagctag

SEQ ID NO: 75 - protein, 2510 aa, synthetic construct
  REGION 1..2510: note = Synthetic: Cas9-Cas9 fusion -21 amino acid residue linker and HiBit tag (mRNA T)-amino acid sequence
MDKKYSIGLDIGTNSVGWAVITDEYKVPSKKFKVLGNTDRHSIKKNLIGALLFDSGETAEATRLKRTARRRYTRRKNRICYLQEIFSNEMAKVDDSFFHRLEESFLVEEDKKHERHPIFGNIVDEVAYHEKYPTIYHLRKKLVDSTDKADLRLIYLALAHMIKFRGHFLIEGDLNPDNSDVDKLFIQLVQTYNQLFEENPINASGVDAKAILSARLSKSRRLENLIAQLPGEKKNGLFGNLIALSLGLTPNFKSNFDLAEDAKLQLSKDTYDDDLDNLLAQIGDQYADLFLAAKNLSDAILLSDILRVNTEITKAPLSASMIKRYDEHHQDLTLLKALVRQQLPEKYKEIFFDQSKNGYAGYIDGGASQEEFYKFIKPILEKMDGTEELLVKLNREDLLRKQRTFDNGSIPHQIHLGELHAILRRQEDFYPFLKDNREKIEKILTFRIPYYVGPLARGNSRFAWMTRKSEETITPWNFEEVVDKGASAQSFIERMTNFDKNLPNEKVLPKHSLLYEYFTVYNELTKVKYVTEGMRKPAFLSGEQKKAIVDLLFKTNRKVTVKQLKEDYFKKIECFDSVEISGVEDRFNASLGTYHDLLKIIKDKDFLDNEENEDILEDIVLTLTLFEDREMIEERLKTYAHLFDDKVMKQLKRRRYTGWGRLSRKLINGIRDKQSGKTILDFLKSDGFANRNFMQLIHDDSLTFKEDIQKAQVSGQGDSLHEHIANLAGSPAIKKGILQTVKVVDELVKVMGRHKPENIVIEMARENQTTQKGQKNSRERMKRIEEGIKELGSQILKEHPVENTQLQNEKLYLYYLQNGRDMYVDQELDINRLSDYDVDHIVPQSFLKDDSIDNKVLTRSDKNRGKSDNVPSEEVVKKMKNYWRQLLNAKLITQRKFDNLTKAERGGLSELDKAGFIKRQLVETRQITKHVAQILDSRMNTKYDENDKLIREVKVITLKSKLVSDFRKDFQFYKVREINNYHHAHDAYLNAVVGTALIKKYPKLESEFVYGDYKVYDVRKMIAKSEQEIGKATAKYFFYSNIMNFFKTEITLANGEIRKRPLIETNGETGEIVWDKGRDFATVRKVLSMPQVNIVKKTEVQTGGFSKESILPKRNSDKLIARKKDWDPKKYGGFDSPTVAYSVLVVAKVEKGKSKKLKSVKELLGITIMERSSFEKNPIDFLEAKGYKEVKKDLIIKLPKYSLFELENGRKRMLASAGELQKGNELALPSKYVNFLYLASHYEKLKGSPEDNEQKQLFVEQHKHYLDEIIEQISEFSKRVILADANLDKVLSAYNKHRDKPIREQAENIIHLFTLTNLGAPAAFKYFDTTIDKKRYTSTKEVLDATLIHQSITGLYETRIDLSQLGGDGAPESATESGGTSTESEGSSSGAAFKPNPINYILGLDIGIASVGWAMVEIDEEENPIRLIDLGVRVFERAEVPKTGDSLAMARRLARSVRRLTRRRAHRLLRARRLLKREGVLQAADFDENGLIKSLPNTPWQLRAAALDRKLTPLEWSAVLLHLIKHRGYLSQRKNEGETADKELGALLKGVANNAHALQTGDFRTPAELALNKFEKESGHIRNQRGDYSHTFSRKDLQAELILLFEKQKEFGNPHVSGGLKEGIETLLMTQRPALSGDAVQKMLGHCTFEPAEPKAAKNTYTAERFIWLTKLNNLRILEQGSERPLTDTERATLMDEPYRKSKLTYAQARKLLGLEDTAFFKGLRYGKDNAEASTLMEMKAYHAISRALEKEGLKDKKSPLNLSSELQDEIGTAFSLFKTDEDITGRLKDRVQPEILEALLKHISFDKFVQISLKALRRIVPLMEQGKRYDEACAEIYGDHYGKKNTEEKIYLPPIPADEIRNPVVLRALSQARKVINGVVRRYGSPARIHIETAREVGKSFKDRKEIEKRQEENRKDREKAAAKFREYFPNFVGEPKSKDILKLRLYEQQHGKCLYSGKEINLVRLNEKGYVEIDHALPFSRTWDDSFNNKVLVLGSENQNKGNQTPYEYFNGKDNSREWQEFKARVETSRFPRSKKQRILLQKFDEDGFKECNLNDTRYVNRFLCQFVADHILLTGKGKRRVFASNGQITNLLRGFWGLRKVRAENDRHHALDAVVVACSTVAMQQKITRFVRYKEMNAFDGKTIDKETGKVLHQKTHFPQPWEFFAQEVMIRVFGKPDGKPEFEEADTPEKLRTLLAEKLSSRPEAVHEYVTPLFVSRAPNRKMSGAHKDTLRSAKRFVKHNEKISVKRVWLTEIKLADLENMVNYKNGREIELYEALKARLEAYGGNAKQAFDPKDNPFYKKGGQLVKAVRVEKTQESGVLLNKKNAYTIADNGDMVRVDVFCKVDKKGKNQYFIVPIYAWQVAENILPDIDCKGYRIDDSYTFCFSLHKYDLIAFQKDEKSKVEFAYYINCDSSNGRFYLAWHDKGSKEQQFRISTQNLVLIQKYQVNELGKEIRPCRLKKRPPVRSGKRTADGSGGGSPKKKRKVSESATPESVSGWRLFKKIS

SEQ ID NO: 76 - RNA, 7476 nt, synthetic construct
  misc_feature 1..7476: note = Synthetic: Cas9-Cas9 fusion -21 amino acid residual linker (mRNA T)-mRNA sequence
  source 1..7476: mol_type = other RNA
atggacaagaagtactccatcggcctggacatcggcaccaactccgtgggctgggccgtgatcaccgacgagtacaaggtgccctccaagaagttcaaggtgctgggcaacaccgaccggcactccatcaagaagaacctgatcggcgccctgctgttcgactccggcgagaccgccgaggccacccggctgaagcggaccgcccggcggcggtacacccggcggaagaaccggatctgctacctgcaggagatcttctccaacgagatggccaaggtggacgactccttcttccaccggctggaggagtccttcctggtggaggaggacaagaagcacgagcggcaccccatcttcggcaacatcgtggacgaggtggcctaccacgagaagtaccccaccatctaccacctgcggaagaagctggtggactccaccgacaaggccgacctgcggctgatctacctggccctggcccacatgatcaagttccggggccacttcctgatcgagggcgacctgaaccccgacaactccgacgtggacaagctgttcatccagctggtgcagacctacaaccagctgttcgaggagaaccccatcaacgcctccggcgtggacgccaaggccatcctgtccgcccggctgtccaagtcccggcggctggagaacctgatcgcccagctgcccggcgagaagaagaacggcctgttcggcaacctgatcgccctgtccctgggcctgacccccaacttcaagtccaacttcgacctggccgaggacgccaagctgcagctgtccaaggacacctacgacgacgacctggacaacctgctggcccagatcggcgaccagtacgccgacctgttcctggccgccaagaacctgtccgacgccatcctgctgtccgacatcctgcgggtgaacaccgagatcaccaaggcccccctgtccgcctccatgatcaagcggtacgacgagcaccaccaggacctgaccctgctgaaggccctggtgcggcagcagctgcccgagaagtacaaggagatcttcttcgaccagtccaagaacggctacgccggctacatcgacggcggcgcctcccaggaggagttctacaagttcatcaagcccatcctggagaagatggacggcaccgaggagctgctggtgaagctgaaccgggaggacctgctgcggaagcagcggaccttcgacaacggctccatcccccaccagatccacctgggcgagctgcacgccatcctgcggcggcaggaggacttctaccccttcctgaaggacaaccgggagaagatcgagaagatcctgaccttccggatcccctactacgtgggccccctggcccggggcaactcccggttcgcctggatgacccggaagtccgaggagaccatcaccccctggaacttcgaggaggtggtggacaagggcgcctccgcccagtccttcatcgagcggatgaccaacttcgacaagaacctgcccaacgagaaggtgctgcccaagcactccctgctgtacgagtacttcaccgtgtacaacgagctgaccaaggtgaagtacgtgaccgagggcatgcggaagcccgccttcctgtccggcgagcagaagaaggccatcgtggacctgctgttcaagaccaaccggaaggtgaccgtgaagcagctgaaggaggactacttcaagaagatcgagtgcttcgactccgtggagatctccggcgtggaggaccggttcaacgcctccctgggcacctaccacgacctgctgaagatcatcaaggacaaggacttcctggacaacgaggagaacgaggacatcctggaggacatcgtgctgaccctgaccctgttcgaggaccgggagatgatcgaggagcggctgaagacctacgcccacctgttcgacgacaaggtgatgaagcagctgaagcggcggcggtacaccggctggggccggctgtcccggaagctgatcaacggcatccgggacaagcagtccggcaagaccatcctggacttcctgaagtccgacggcttcgccaaccggaacttcatgcagctgatccacgacgactccctgaccttcaaggaggacatccagaaggcccaggtgtccggccagggcgactccctgcacgagcacatcgccaacctggccggctcccccgccatcaagaagggcatcctgcagaccgtgaaggtggtggacgagctggtgaaggtgatgggccggcacaagcccgagaacatcgtgatcgagatggcccgggagaaccagaccacccagaagggccagaagaactcccgggagcggatgaagcggatcgaggagggcatcaaggagctgggctcccagatcctgaaggagcaccccgtggagaacacccagctgcagaacgagaagctgtacctgtactacctgcagaacggccgggacatgtacgtggaccaggagctggacatcaaccggctgtccgactacgacgtggaccacatcgtgccccagtccttcctgaaggacgactccatcgacaacaaggtgctgacccggtccgacaagaaccggggcaagtccgacaacgtgccctccgaggaggtggtgaagaagatgaagaactactggcggcagctgctgaacgccaagctgatcacccagcggaagttcgacaacctgaccaaggccgagcggggcggcctgtccgagctggacaaggccggcttcatcaagcggcagctggtggagacccggcagatcaccaagcacgtggcccagatcctggactcccggatgaacaccaagtacgacgagaacgacaagctgatccgggaggtgaaggtgatcaccctgaagtccaagctggtgtccgacttccggaaggacttccagttctacaaggtgcgggagatcaacaactaccaccacgcccacgacgcctacctgaacgccgtggtgggcaccgccctgatcaagaagtaccccaagctggagtccgagttcgtgtacggcgactacaaggtgtacgacgtgcggaagatgatcgccaagtccgagcaggagatcggcaaggccaccgccaagtacttcttctactccaacatcatgaacttcttcaagaccgagatcaccctggccaacggcgagatccggaagcggcccctgatcgagaccaacggcgagaccggcgagatcgtgtgggacaagggccgggacttcgccaccgtgcggaaggtgctgtccatgccccaggtgaacatcgtgaagaagaccgaggtgcagaccggcggcttctccaaggagtccatcctgcccaagcggaactccgacaagctgatcgcccggaagaaggactgggaccccaagaagtacggcggcttcgactcccccaccgtggcctactccgtgctggtggtggccaaggtggagaagggcaagtccaagaagctgaagtccgtgaaggagctgctgggcatcaccatcatggagcggtcctccttcgagaagaaccccatcgacttcctggaggccaagggctacaaggaggtgaagaaggacctgatcatcaagctgcccaagtactccctgttcgagctggagaacggccggaagcggatgctggcctccgccggcgagctgcagaagggcaacgagctggccctgccctccaagtacgtgaacttcctgtacctggcctcccactacgagaagctgaagggctcccccgaggacaacgagcagaagcagctgttcgtggagcagcacaagcactacctggacgagatcatcgagcagatctccgagttctccaagcgggtgatcctggccgacgccaacctggacaaggtgctgtccgcctacaacaagcaccgggacaagcccatccgggagcaggccgagaacatcatccacctgttcaccctgaccaacctgggcgcccccgccgccttcaagtacttcgacaccaccatcgacaagaagcggtacacctccaccaaggaggtgctggacgccaccctgatccaccagtccatcaccggcctgtacgagacccggatcgacctgtcccagctgggcggcgacggcgcccccgagtccgccaccgagtccggcggcacctccaccgagtccgagggctcctcctccggtgccgccttcaagcccaaccccatcaactacatcctgggcctggacatcggcatcgcctccgtgggctgggccatggtggagatcgacgaggaggagaaccccatccggctgatcgacctgggcgtgcgggtgttcgagcgggccgaggtgcccaagaccggcgactccctggccatggcccggcggctggcccggtccgtgcggcggctgacccggcggcgggcccaccggctgctgcgggcccggcggctgctgaagcgggagggcgtgctgcaggccgccgacttcgacgagaacggcctgatcaagtccctgcccaacaccccctggcagctgcgggccgccgccctggaccggaagctgacccccctggagtggtccgccgtgctgctgcacctgatcaagcaccggggctacctgtcccagcggaagaacgagggcgagaccgccgacaaggagctgggcgccctgctgaagggcgtggccaacaacgcccacgccctgcagaccggcgacttccggacccccgccgagctggccctgaacaagttcgagaaggagtccggccacatccggaaccagcggggcgactactcccacaccttctcccggaaggacctgcaggccgagctgatcctgctgttcgagaagcagaaggagttcggcaacccccacgtgtccggcggcctgaaggagggcatcgagaccctgctgatgacccagcggcccgccctgtccggcgacgccgtgcagaagatgctgggccactgcaccttcgagcccgccgagcccaaggccgccaagaacacctacaccgccgagcggttcatctggctgaccaagctgaacaacctgcggatcctggagcagggctccgagcggcccctgaccgacaccgagcgggccaccctgatggacgagccctaccggaagtccaagctgacctacgcccaggcccggaagctgctgggcctggaggacaccgccttcttcaagggcctgcggtacggcaaggacaacgccgaggcctccaccctgatggagatgaaggcctaccacgccatctcccgggccctggagaaggagggcctgaaggacaagaagtcccccctgaacctgtcctccgagctgcaggacgagatcggcaccgccttctccctgttcaagaccgacgaggacatcaccggccggctgaaggaccgggtgcagcccgagatcctggaggccctgctgaagcacatctccttcgacaagttcgtgcagatctccctgaaggccctgcggcggatcgtgcccctgatggagcagggcaagcggtacgacgaggcctgcgccgagatctacggcgaccactacggcaagaagaacaccgaggagaagatctacctgccccccatccccgccgacgagatccggaaccccgtggtgctgcgggccctgtcccaggcccggaaggtgatcaacggcgtggtgcggcggtacggctcccccgcccggatccacatcgagaccgcccgggaggtgggcaagtccttcaaggaccggaaggagatcgagaagcggcaggaggagaaccggaaggaccgggagaaggccgccgccaagttccgggagtacttccccaacttcgtgggcgagcccaagtccaaggacatcctgaagctgcggctgtacgagcagcagcacggcaagtgcctgtactccggcaaggagatcaacctggtgcggctgaacgagaagggctacgtggagatcgaccacgccctgcccttctcccggacctgggacgactccttcaacaacaaggtgctggtgctgggctccgagaaccagaacaagggcaaccagaccccctacgagtacttcaacggcaaggacaactcccgggagtggcaggagttcaaggcccgggtggagacctcccggttcccccggtccaagaagcagcggatcctgctgcagaagttcgacgaggacggcttcaaggagtgcaacctgaacgacacccggtacgtgaaccgcttcctgtgccagttcgtggccgaccacatcctgctgaccggcaagggcaagcggcgggtgttcgcctccaacggccagatcaccaacctgctgcggggcttctggggcctgcggaaggtgcgggccgagaacgaccggcaccacgccctggacgccgtggtggtggcctgctccaccgtggccatgcagcagaagatcacccggttcgtgcggtacaaggagatgaacgccttcgacggcaagaccatcgacaaggagaccggcaaggtgctgcaccagaagacccacttcccccagccctgggagttcttcgcccaggaggtgatgatccgggtgttcggcaagcccgacggcaagcccgagttcgaggaggccgacacccccgagaagctgcggaccctgctggccgagaagctgtcctcccggcccgaggccgtgcacgagtacgtgacccccctgttcgtgtcccgggcccccaaccggaagatgtccggcgcccacaaggacaccctgcggtccgccaagcggttcgtgaagcacaacgagaagatctccgtgaagcgggtgtggctgaccgagatcaagctggccgacctggagaacatggtgaactacaagaacggccgggagatcgagctgtacgaggccctgaaggcccggctggaggcctacggcggcaacgccaagcaggccttcgaccccaaggacaaccccttctacaagaagggcggccagctggtgaaggccgtgcgggtggagaagacccaggagtccggcgtgctgctgaacaagaagaacgcctacaccatcgccgacaacggcgacatggtgcgggtggacgtgttctgcaaggtggacaagaagggcaagaaccagtacttcatcgtgcccatctacgcctggcaggtggccgagaacatcctgcccgacatcgactgcaagggctaccggatcgacgactcctacaccttctgcttctccctgcacaagtacgacctgatcgccttccagaaggacgagaagtccaaggtggagttcgcctactacatcaactgcgactcctccaacggccggttctacctggcctggcacgacaagggctccaaggagcagcagttccggatctccacccagaacctggtgctgatccagaagtaccaggtgaacgagctgggcaaggagatccggccctgccggctgaagaagcggccccccgtgcggtccggaaagcggaccgccgacggctccggaggaggaagcccgaagaagaagagaaaggtctag

SEQ ID NO: 77 - protein, 2491 aa, synthetic construct
  REGION 1..2491: note = Synthetic: Cas9-Cas9 fusion -21 amino acid residual linker (mRNA T)- amino acid sequence
MDKKYSIGLDIGTNSVGWAVITDEYKVPSKKFKVLGNTDRHSIKKNLIGALLFDSGETAEATRLKRTARRRYTRRKNRICYLQEIFSNEMAKVDDSFFHRLEESFLVEEDKKHERHPIFGNIVDEVAYHEKYPTIYHLRKKLVDSTDKADLRLIYLALAHMIKFRGHFLIEGDLNPDNSDVDKLFIQLVQTYNQLFEENPINASGVDAKAILSARLSKSRRLENLIAQLPGEKKNGLFGNLIALSLGLTPNFKSNFDLAEDAKLQLSKDTYDDDLDNLLAQIGDQYADLFLAAKNLSDAILLSDILRVNTEITKAPLSASMIKRYDEHHQDLTLLKALVRQQLPEKYKEIFFDQSKNGYAGYIDGGASQEEFYKFIKPILEKMDGTEELLVKLNREDLLRKQRTFDNGSIPHQIHLGELHAILRRQEDFYPFLKDNREKIEKILTFRIPYYVGPLARGNSRFAWMTRKSEETITPWNFEEVVDKGASAQSFIERMTNFDKNLPNEKVLPKHSLLYEYFTVYNELTKVKYVTEGMRKPAFLSGEQKKAIVDLLFKTNRKVTVKQLKEDYFKKIECFDSVEISGVEDRFNASLGTYHDLLKIIKDKDFLDNEENEDILEDIVLTLTLFEDREMIEERLKTYAHLFDDKVMKQLKRRRYTGWGRLSRKLINGIRDKQSGKTILDFLKSDGFANRNFMQLIHDDSLTFKEDIQKAQVSGQGDSLHEHIANLAGSPAIKKGILQTVKVVDELVKVMGRHKPENIVIEMARENQTTQKGQKNSRERMKRIEEGIKELGSQILKEHPVENTQLQNEKLYLYYLQNGRDMYVDQELDINRLSDYDVDHIVPQSFLKDDSIDNKVLTRSDKNRGKSDNVPSEEVVKKMKNYWRQLLNAKLITQRKFDNLTKAERGGLSELDKAGFIKRQLVETRQITKHVAQILDSRMNTKYDENDKLIREVKVITLKSKLVSDFRKDFQFYKVREINNYHHAHDAYLNAVVGTALIKKYPKLESEFVYGDYKVYDVRKMIAKSEQEIGKATAKYFFYSNIMNFFKTEITLANGEIRKRPLIETNGETGEIVWDKGRDFATVRKVLSMPQVNIVKKTEVQTGGFSKESILPKRNSDKLIARKKDWDPKKYGGFDSPTVAYSVLVVAKVEKGKSKKLKSVKELLGITIMERSSFEKNPIDFLEAKGYKEVKKDLIIKLPKYSLFELENGRKRMLASAGELQKGNELALPSKYVNFLYLASHYEKLKGSPEDNEQKQLFVEQHKHYLDEIIEQISEFSKRVILADANLDKVLSAYNKHRDKPIREQAENIIHLFTLTNLGAPAAFKYFDTTIDKKRYTSTKEVLDATLIHQSITGLYETRIDLSQLGGDGAPESATESGGTSTESEGSSSGAAFKPNPINYILGLDIGIASVGWAMVEIDEEENPIRLIDLGVRVFERAEVPKTGDSLAMARRLARSVRRLTRRRAHRLLRARRLLKREGVLQAADFDENGLIKSLPNTPWQLRAAALDRKLTPLEWSAVLLHLIKHRGYLSQRKNEGETADKELGALLKGVANNAHALQTGDFRTPAELALNKFEKESGHIRNQRGDYSHTFSRKDLQAELILLFEKQKEFGNPHVSGGLKEGIETLLMTQRPALSGDAVQKMLGHCTFEPAEPKAAKNTYTAERFIWLTKLNNLRILEQGSERPLTDTERATLMDEPYRKSKLTYAQARKLLGLEDTAFFKGLRYGKDNAEASTLMEMKAYHAISRALEKEGLKDKKSPLNLSSELQDEIGTAFSLFKTDEDITGRLKDRVQPEILEALLKHISFDKFVQISLKALRRIVPLMEQGKRYDEACAEIYGDHYGKKNTEEKIYLPPIPADEIRNPVVLRALSQARKVINGVVRRYGSPARIHIETAREVGKSFKDRKEIEKRQEENRKDREKAAAKFREYFPNFVGEPKSKDILKLRLYEQQHGKCLYSGKEINLVRLNEKGYVEIDHALPFSRTWDDSFNNKVLVLGSENQNKGNQTPYEYFNGKDNSREWQEFKARVETSRFPRSKKQRILLQKFDEDGFKECNLNDTRYVNRFLCQFVADHILLTGKGKRRVFASNGQITNLLRGFWGLRKVRAENDRHHALDAVVVACSTVAMQQKITRFVRYKEMNAFDGKTIDKETGKVLHQKTHFPQPWEFFAQEVMIRVFGKPDGKPEFEEADTPEKLRTLLAEKLSSRPEAVHEYVTPLFVSRAPNRKMSGAHKDTLRSAKRFVKHNEKISVKRVWLTEIKLADLENMVNYKNGREIELYEALKARLEAYGGNAKQAFDPKDNPFYKKGGQLVKAVRVEKTQESGVLLNKKNAYTIADNGDMVRVDVFCKVDKKGKNQYFIVPIYAWQVAENILPDIDCKGYRIDDSYTFCFSLHKYDLIAFQKDEKSKVEFAYYINCDSSNGRFYLAWHDKGSKEQQFRISTQNLVLIQKYQVNELGKEIRPCRLKKRPPVRSGKRTADGSGGGSPKKKRKV

SEQ ID NO: 78 - RNA, 8063 nt, synthetic construct
  misc_feature 1..8063: note = Synthetic: Cas9-Cas9 fusion -11 amino acid residue linker and HiBit tag (mRNA U)-mRNA sequence
  source 1..8063: mol_type = other RNA
gggaagctcagaataaacgctcaactttggccggatctgccaccatggacaagaagtactccatcggcctggacatcggcaccaactccgtgggctgggccgtgatcaccgacgagtacaaggtgccctccaagaagttcaaggtgctgggcaacaccgaccggcactccatcaagaagaacctgatcggcgccctgctgttcgactccggcgagaccgccgaggccacccggctgaagcggaccgcccggcggcggtacacccggcggaagaaccggatctgctacctgcaggagatcttctccaacgagatggccaaggtggacgactccttcttccaccggctggaggagtccttcctggtggaggaggacaagaagcacgagcggcaccccatcttcggcaacatcgtggacgaggtggcctaccacgagaagtaccccaccatctaccacctgcggaagaagctggtggactccaccgacaaggccgacctgcggctgatctacctggccctggcccacatgatcaagttccggggccacttcctgatcgagggcgacctgaaccccgacaactccgacgtggacaagctgttcatccagctggtgcagacctacaaccagctgttcgaggagaaccccatcaacgcctccggcgtggacgccaaggccatcctgtccgcccggctgtccaagtcccggcggctggagaacctgatcgcccagctgcccggcgagaagaagaacggcctgttcggcaacctgatcgccctgtccctgggcctgacccccaacttcaagtccaacttcgacctggccgaggacgccaagctgcagctgtccaaggacacctacgacgacgacctggacaacctgctggcccagatcggcgaccagtacgccgacctgttcctggccgccaagaacctgtccgacgccatcctgctgtccgacatcctgcgggtgaacaccgagatcaccaaggcccccctgtccgcctccatgatcaagcggtacgacgagcaccaccaggacctgaccctgctgaaggccctggtgcggcagcagctgcccgagaagtacaaggagatcttcttcgaccagtccaagaacggctacgccggctacatcgacggcggcgcctcccaggaggagttctacaagttcatcaagcccatcctggagaagatggacggcaccgaggagctgctggtgaagctgaaccgggaggacctgctgcggaagcagcggaccttcgacaacggctccatcccccaccagatccacctgggcgagctgcacgccatcctgcggcggcaggaggacttctaccccttcctgaaggacaaccgggagaagatcgagaagatcctgaccttccggatcccctactacgtgggccccctggcccggggcaactcccggttcgcctggatgacccggaagtccgaggagaccatcaccccctggaacttcgaggaggtggtggacaagggcgcctccgcccagtccttcatcgagcggatgaccaacttcgacaagaacctgcccaacgagaaggtgctgcccaagcactccctgctgtacgagtacttcaccgtgtacaacgagctgaccaaggtgaagtacgtgaccgagggcatgcggaagcccgccttcctgtccggcgagcagaagaaggccatcgtggacctgctgttcaagaccaaccggaaggtgaccgtgaagcagctgaaggaggactacttcaagaagatcgagtgcttcgactccgtggagatctccggcgtggaggaccggttcaacgcctccctgggcacctaccacgacctgctgaagatcatcaaggacaaggacttcctggacaacgaggagaacgaggacatcctggaggacatcgtgctgaccctgaccctgttcgaggaccgggagatgatcgaggagcggctgaagacctacgcccacctgttcgacgacaaggtgatgaagcagctgaagcggcggcggtacaccggctggggccggctgtcccggaagctgatcaacggcatccgggacaagcagtccggcaagaccatcctggacttcctgaagtccgacggcttcgccaaccggaacttcatgcagctgatccacgacgactccctgaccttcaaggaggacatccagaaggcccaggtgtccggccagggcgactccctgcacgagcacatcgccaacctggccggctcccccgccatcaagaagggcatcctgcagaccgtgaaggtggtggacgagctggtgaaggtgatgggccggcacaagcccgagaacatcgtgatcgagatggcccgggagaaccagaccacccagaagggccagaagaactcccgggagcggatgaagcggatcgaggagggcatcaaggagctgggctcccagatcctgaaggagcaccccgtggagaacacccagctgcagaacgagaagctgtacctgtactacctgcagaacggccgggacatgtacgtggaccaggagctggacatcaaccggctgtccgactacgacgtggaccacatcgtgccccagtccttcctgaaggacgactccatcgacaacaaggtgctgacccggtccgacaagaaccggggcaagtccgacaacgtgccctccgaggaggtggtgaagaagatgaagaactactggcggcagctgctgaacgccaagctgatcacccagcggaagttcgacaacctgaccaaggccgagcggggcggcctgtccgagctggacaaggccggcttcatcaagcggcagctggtggagacccggcagatcaccaagcacgtggcccagatcctggactcccggatgaacaccaagtacgacgagaacgacaagctgatccgggaggtgaaggtgatcaccctgaagtccaagctggtgtccgacttccggaaggacttccagttctacaaggtgcgggagatcaacaactaccaccacgcccacgacgcctacctgaacgccgtggtgggcaccgccctgatcaagaagtaccccaagctggagtccgagttcgtgtacggcgactacaaggtgtacgacgtgcggaagatgatcgccaagtccgagcaggagatcggcaaggccaccgccaagtacttcttctactccaacatcatgaacttcttcaagaccgagatcaccctggccaacggcgagatccggaagcggcccctgatcgagaccaacggcgagaccggcgagatcgtgtgggacaagggccgggacttcgccaccgtgcggaaggtgctgtccatgccccaggtgaacatcgtgaagaagaccgaggtgcagaccggcggcttctccaaggagtccatcctgcccaagcggaactccgacaagctgatcgcccggaagaaggactgggaccccaagaagtacggcggcttcgactcccccaccgtggcctactccgtgctggtggtggccaaggtggagaagggcaagtccaagaagctgaagtccgtgaaggagctgctgggcatcaccatcatggagcggtcctccttcgagaagaaccccatcgacttcctggaggccaagggctacaaggaggtgaagaaggacctgatcatcaagctgcccaagtactccctgttcgagctggagaacggccggaagcggatgctggcctccgccggcgagctgcagaagggcaacgagctggccctgccctccaagtacgtgaacttcctgtacctggcctcccactacgagaagctgaagggctcccccgaggacaacgagcagaagcagctgttcgtggagcagcacaagcactacctggacgagatcatcgagcagatctccgagttctccaagcgggtgatcctggccgacgccaacctggacaaggtgctgtccgcctacaacaagcaccgggacaagcccatccgggagcaggccgagaacatcatccacctgttcaccctgaccaacctgggcgcccccgccgccttcaagtacttcgacaccaccatcgacaagaagcggtacacctccaccaaggaggtgctggacgccaccctgatccaccagtccatcaccggcctgtacgagacccggatcgacctgtcccagctgggcggcgacggcgcccccgagtccgccaccggctcctcctccggtgccgccttcaagcccaaccccatcaactacatcctgggcctggacatcggcatcgcctccgtgggctgggccatggtggagatcgacgaggaggagaaccccatccggctgatcgacctgggcgtgcgggtgttcgagcgggccgaggtgcccaagaccggcgactccctggccatggcccggcggctggcccggtccgtgcggcggctgacccggcggcgggcccaccggctgctgcgggcccggcggctgctgaagcgggagggcgtgctgcaggccgccgacttcgacgagaacggcctgatcaagtccctgcccaacaccccctggcagctgcgggccgccgccctggaccggaagctgacccccctggagtggtccgccgtgctgctgcacctgatcaagcaccggggctacctgtcccagcggaagaacgagggcgagaccgccgacaaggagctgggcgccctgctgaagggcgtggccaacaacgcccacgccctgcagaccggcgacttccggacccccgccgagctggccctgaacaagttcgagaaggagtccggccacatccggaaccagcggggcgactactcccacaccttctcccggaaggacctgcaggccgagctgatcctgctgttcgagaagcagaaggagttcggcaacccccacgtgtccggcggcctgaaggagggcatcgagaccctgctgatgacccagcggcccgccctgtccggcgacgccgtgcagaagatgctgggccactgcaccttcgagcccgccgagcccaaggccgccaagaacacctacaccgccgagcggttcatctggctgaccaagctgaacaacctgcggatcctggagcagggctccgagcggcccctgaccgacaccgagcgggccaccctgatggacgagccctaccggaagtccaagctgacctacgcccaggcccggaagctgctgggcctggaggacaccgccttcttcaagggcctgcggtacggcaaggacaacgccgaggcctccaccctgatggagatgaaggcctaccacgccatctcccgggccctggagaaggagggcctgaaggacaagaagtcccccctgaacctgtcctccgagctgcaggacgagatcggcaccgccttctccctgttcaagaccgacgaggacatcaccggccggctgaaggaccgggtgcagcccgagatcctggaggccctgctgaagcacatctccttcgacaagttcgtgcagatctccctgaaggccctgcggcggatcgtgcccctgatggagcagggcaagcggtacgacgaggcctgcgccgagatctacggcgaccactacggcaagaagaacaccgaggagaagatctacctgccccccatccccgccgacgagatccggaaccccgtggtgctgcgggccctgtcccaggcccggaaggtgatcaacggcgtggtgcggcggtacggctcccccgcccggatccacatcgagaccgcccgggaggtgggcaagtccttcaaggaccggaaggagatcgagaagcggcaggaggagaaccggaaggaccgggagaaggccgccgccaagttccgggagtacttccccaacttcgtgggcgagcccaagtccaaggacatcctgaagctgcggctgtacgagcagcagcacggcaagtgcctgtactccggcaaggagatcaacctggtgcggctgaacgagaagggctacgtggagatcgaccacgccctgcccttctcccggacctgggacgactccttcaacaacaaggtgctggtgctgggctccgagaaccagaacaagggcaaccagaccccctacgagtacttcaacggcaaggacaactcccgggagtggcaggagttcaaggcccgggtggagacctcccggttcccccggtccaagaagcagcggatcctgctgcagaagttcgacgaggacggcttcaaggagtgcaacctgaacgacacccggtacgtgaaccgcttcctgtgccagttcgtggccgaccacatcctgctgaccggcaagggcaagcggcgggtgttcgcctccaacggccagatcaccaacctgctgcggggcttctggggcctgcggaaggtgcgggccgagaacgaccggcaccacgccctggacgccgtggtggtggcctgctccaccgtggccatgcagcagaagatcacccggttcgtgcggtacaaggagatgaacgccttcgacggcaagaccatcgacaaggagaccggcaaggtgctgcaccagaagacccacttcccccagccctgggagttcttcgcccaggaggtgatgatccgggtgttcggcaagcccgacggcaagcccgagttcgaggaggccgacacccccgagaagctgcggaccctgctggccgagaagctgtcctcccggcccgaggccgtgcacgagtacgtgacccccctgttcgtgtcccgggcccccaaccggaagatgtccggcgcccacaaggacaccctgcggtccgccaagcggttcgtgaagcacaacgagaagatctccgtgaagcgggtgtggctgaccgagatcaagctggccgacctggagaacatggtgaactacaagaacggccgggagatcgagctgtacgaggccctgaaggcccggctggaggcctacggcggcaacgccaagcaggccttcgaccccaaggacaaccccttctacaagaagggcggccagctggtgaaggccgtgcgggtggagaagacccaggagtccggcgtgctgctgaacaagaagaacgcctacaccatcgccgacaacggcgacatggtgcgggtggacgtgttctgcaaggtggacaagaagggcaagaaccagtacttcatcgtgcccatctacgcctggcaggtggccgagaacatcctgcccgacatcgactgcaagggctaccggatcgacgactcctacaccttctgcttctccctgcacaagtacgacctgatcgccttccagaaggacgagaagtccaaggtggagttcgcctactacatcaactgcgactcctccaacggccggttctacctggcctggcacgacaagggctccaaggagcagcagttccggatctccacccagaacctggtgctgatccagaagtaccaggtgaacgagctgggcaaggagatccggccctgccggctgaagaagcggccccccgtgcggtccggaaagcggaccgccgacggctccggaggaggaagcccgaagaagaagagaaaggtcagcgaaagcgcaacaccggaaagcgtcagcggatggagactgttcaagaagatcagctagctagcaccagcctcaagaacacccgaatggagtctctaagctacataataccaacttacactttacaaaatgttgtcccccaaaatgtagccattcgtatctgctcctaataaaaagaaagtttcttcacattctctcgagaaaaaaaaaaaatggaaaaaaaaaaaacggaaaaaaaaaaaaggtaaaaaaaaaaaatataaaaaaaaaaaacataaaaaaaaaaaacgaaaaaaaaaaaacgtaaaaaaaaaaaactcaaaaaaaaaaaagataaaaaaaaaaaacctaaaaaaaaaaaatgtaaaaaaaaaaaagggaaaaaaaaaaaacgcaaaaaaaaaaaacacaaaaaaaaaaaatgcaaaaaaaaaaaatcgaaaaaaaaaaaatctaaaaaaaaaaaacgaaaaaaaaaaaacccaaaaaaaaaaaagacaaaaaaaaaaaatagaaaaaaaaaaaagttaaaaaaaaaaaactgaaaaaaaaaaaatttaaaaaaaaaaaatctag

SEQ ID NO: 79 - RNA, 7503 nt, synthetic construct
  misc_feature 1..7503: note = Synthetic: Cas9-Cas9 fusion -11 amino acid residue linker and HiBit tag (mRNA U)-ORF sequence
  source 1..7503: mol_type = other RNA
atggacaagaagtactccatcggcctggacatcggcaccaactccgtgggctgggccgtgatcaccgacgagtacaaggtgccctccaagaagttcaaggtgctgggcaacaccgaccggcactccatcaagaagaacctgatcggcgccctgctgttcgactccggcgagaccgccgaggccacccggctgaagcggaccgcccggcggcggtacacccggcggaagaaccggatctgctacctgcaggagatcttctccaacgagatggccaaggtggacgactccttcttccaccggctggaggagtccttcctggtggaggaggacaagaagcacgagcggcaccccatcttcggcaacatcgtggacgaggtggcctaccacgagaagtaccccaccatctaccacctgcggaagaagctggtggactccaccgacaaggccgacctgcggctgatctacctggccctggcccacatgatcaagttccggggccacttcctgatcgagggcgacctgaaccccgacaactccgacgtggacaagctgttcatccagctggtgcagacctacaaccagctgttcgaggagaaccccatcaacgcctccggcgtggacgccaaggccatcctgtccgcccggctgtccaagtcccggcggctggagaacctgatcgcccagctgcccggcgagaagaagaacggcctgttcggcaacctgatcgccctgtccctgggcctgacccccaacttcaagtccaacttcgacctggccgaggacgccaagctgcagctgtccaaggacacctacgacgacgacctggacaacctgctggcccagatcggcgaccagtacgccgacctgttcctggccgccaagaacctgtccgacgccatcctgctgtccgacatcctgcgggtgaacaccgagatcaccaaggcccccctgtccgcctccatgatcaagcggtacgacgagcaccaccaggacctgaccctgctgaaggccctggtgcggcagcagctgcccgagaagtacaaggagatcttcttcgaccagtccaagaacggctacgccggctacatcgacggcggcgcctcccaggaggagttctacaagttcatcaagcccatcctggagaagatggacggcaccgaggagctgctggtgaagctgaaccgggaggacctgctgcggaagcagcggaccttcgacaacggctccatcccccaccagatccacctgggcgagctgcacgccatcctgcggcggcaggaggacttctaccccttcctgaaggacaaccgggagaagatcgagaagatcctgaccttccggatcccctactacgtgggccccctggcccggggcaactcccggttcgcctggatgacccggaagtccgaggagaccatcaccccctggaacttcgaggaggtggtggacaagggcgcctccgcccagtccttcatcgagcggatgaccaacttcgacaagaacctgcccaacgagaaggtgctgcccaagcactccctgctgtacgagtacttcaccgtgtacaacgagctgaccaaggtgaagtacgtgaccgagggcatgcggaagcccgccttcctgtccggcgagcagaagaaggccatcgtggacctgctgttcaagaccaaccggaaggtgaccgtgaagcagctgaaggaggactacttcaagaagatcgagtgcttcgactccgtggagatctccggcgtggaggaccggttcaacgcctccctgggcacctaccacgacctgctgaagatcatcaaggacaaggacttcctggacaacgaggagaacgaggacatcctggaggacatcgtgctgaccctgaccctgttcgaggaccgggagatgatcgaggagcggctgaagacctacgcccacctgttcgacgacaaggtgatgaagcagctgaagcggcggcggtacaccggctggggccggctgtcccggaagctgatcaacggcatccgggacaagcagtccggcaagaccatcctggacttcctgaagtccgacggcttcgccaaccggaacttcatgcagctgatccacgacgactccctgaccttcaaggaggacatccagaaggcccaggtgtccggccagggcgactccctgcacgagcacatcgccaacctggccggctcccccgccatcaagaagggcatcctgcagaccgtgaaggtggtggacgagctggtgaaggtgatgggccggcacaagcccgagaacatcgtgatcgagatggcccgggagaaccagaccacccagaagggccagaagaactcccgggagcggatgaagcggatcgaggagggcatcaaggagctgggctcccagatcctgaaggagcaccccgtggagaacacccagctgcagaacgagaagctgtacctgtactacctgcagaacggccgggacatgtacgtggaccaggagctggacatcaaccggctgtccgactacgacgtggaccacatcgtgccccagtccttcctgaaggacgactccatcgacaacaaggtgctgacccggtccgacaagaaccggggcaagtccgacaacgtgccctccgaggaggtggtgaagaagatgaagaactactggcggcagctgctgaacgccaagctgatcacccagcggaagttcgacaacctgaccaaggccgagcggggcggcctgtccgagctggacaaggccggcttcatcaagcggcagctggtggagacccggcagatcaccaagcacgtggcccagatcctggactcccggatgaacaccaagtacgacgagaacgacaagctgatccgggaggtgaaggtgatcaccctgaagtccaagctggtgtccgacttccggaaggacttccagttctacaaggtgcgggagatcaacaactaccaccacgcccacgacgcctacctgaacgccgtggtgggcaccgccctgatcaagaagtaccccaagctggagtccgagttcgtgtacggcgactacaaggtgtacgacgtgcggaagatgatcgccaagtccgagcaggagatcggcaaggccaccgccaagtacttcttctactccaacatcatgaacttcttcaagaccgagatcaccctggccaacggcgagatccggaagcggcccctgatcgagaccaacggcgagaccggcgagatcgtgtgggacaagggccgggacttcgccaccgtgcggaaggtgctgtccatgccccaggtgaacatcgtgaagaagaccgaggtgcagaccggcggcttctccaaggagtccatcctgcccaagcggaactccgacaagctgatcgcccggaagaaggactgggaccccaagaagtacggcggcttcgactcccccaccgtggcctactccgtgctggtggtggccaaggtggagaagggcaagtccaagaagctgaagtccgtgaaggagctgctgggcatcaccatcatggagcggtcctccttcgagaagaaccccatcgacttcctggaggccaagggctacaaggaggtgaagaaggacctgatcatcaagctgcccaagtactccctgttcgagctggagaacggccggaagcggatgctggcctccgccggcgagctgcagaagggcaacgagctggccctgccctccaagtacgtgaacttcctgtacctggcctcccactacgagaagctgaagggctcccccgaggacaacgagcagaagcagctgttcgtggagcagcacaagcactacctggacgagatcatcgagcagatctccgagttctccaagcgggtgatcctggccgacgccaacctggacaaggtgctgtccgcctacaacaagcaccgggacaagcccatccgggagcaggccgagaacatcatccacctgttcaccctgaccaacctgggcgcccccgccgccttcaagtacttcgacaccaccatcgacaagaagcggtacacctccaccaaggaggtgctggacgccaccctgatccaccagtccatcaccggcctgtacgagacccggatcgacctgtcccagctgggcggcgacggcgcccccgagtccgccaccggctcctcctccggtgccgccttcaagcccaaccccatcaactacatcctgggcctggacatcggcatcgcctccgtgggctgggccatggtggagatcgacgaggaggagaaccccatccggctgatcgacctgggcgtgcgggtgttcgagcgggccgaggtgcccaagaccggcgactccctggccatggcccggcggctggcccggtccgtgcggcggctgacccggcggcgggcccaccggctgctgcgggcccggcggctgctgaagcgggagggcgtgctgcaggccgccgacttcgacgagaacggcctgatcaagtccctgcccaacaccccctggcagctgcgggccgccgccctggaccggaagctgacccccctggagtggtccgccgtgctgctgcacctgatcaagcaccggggctacctgtcccagcggaagaacgagggcgagaccgccgacaaggagctgggcgccctgctgaagggcgtggccaacaacgcccacgccctgcagaccggcgacttccggacccccgccgagctggccctgaacaagttcgagaaggagtccggccacatccggaaccagcggggcgactactcccacaccttctcccggaaggacctgcaggccgagctgatcctgctgttcgagaagcagaaggagttcggcaacccccacgtgtccggcggcctgaaggagggcatcgagaccctgctgatgacccagcggcccgccctgtccggcgacgccgtgcagaagatgctgggccactgcaccttcgagcccgccgagcccaaggccgccaagaacacctacaccgccgagcggttcatctggctgaccaagctgaacaacctgcggatcctggagcagggctccgagcggcccctgaccgacaccgagcgggccaccctgatggacgagccctaccggaagtccaagctgacctacgcccaggcccggaagctgctgggcctggaggacaccgccttcttcaagggcctgcggtacggcaaggacaacgccgaggcctccaccctgatggagatgaaggcctaccacgccatctcccgggccctggagaaggagggcctgaaggacaagaagtcccccctgaacctgtcctccgagctgcaggacgagatcggcaccgccttctccctgttcaagaccgacgaggacatcaccggccggctgaaggaccgggtgcagcccgagatcctggaggccctgctgaagcacatctccttcgacaagttcgtgcagatctccctgaaggccctgcggcggatcgtgcccctgatggagcagggcaagcggtacgacgaggcctgcgccgagatctacggcgaccactacggcaagaagaacaccgaggagaagatctacctgccccccatccccgccgacgagatccggaaccccgtggtgctgcgggccctgtcccaggcccggaaggtgatcaacggcgtggtgcggcggtacggctcccccgcccggatccacatcgagaccgcccgggaggtgggcaagtccttcaaggaccggaaggagatcgagaagcggcaggaggagaaccggaaggaccgggagaaggccgccgccaagttccgggagtacttccccaacttcgtgggcgagcccaagtccaaggacatcctgaagctgcggctgtacgagcagcagcacggcaagtgcctgtactccggcaaggagatcaacctggtgcggctgaacgagaagggctacgtggagatcgaccacgccctgcccttctcccggacctgggacgactccttcaacaacaaggtgctggtgctgggctccgagaaccagaacaagggcaaccagaccccctacgagtacttcaacggcaaggacaactcccgggagtggcaggagttcaaggcccgggtggagacctcccggttcccccggtccaagaagcagcggatcctgctgcagaagttcgacgaggacggcttcaaggagtgcaacctgaacgacacccggtacgtgaaccgcttcctgtgccagttcgtggccgaccacatcctgctgaccggcaagggcaagcggcgggtgttcgcctccaacggccagatcaccaacctgctgcggggcttctggggcctgcggaaggtgcgggccgagaacgaccggcaccacgccctggacgccgtggtggtggcctgctccaccgtggccatgcagcagaagatcacccggttcgtgcggtacaaggagatgaacgccttcgacggcaagaccatcgacaaggagaccggcaaggtgctgcaccagaagacccacttcccccagccctgggagttcttcgcccaggaggtgatgatccgggtgttcggcaagcccgacggcaagcccgagttcgaggaggccgacacccccgagaagctgcggaccctgctggccgagaagctgtcctcccggcccgaggccgtgcacgagtacgtgacccccctgttcgtgtcccgggcccccaaccggaagatgtccggcgcccacaaggacaccctgcggtccgccaagcggttcgtgaagcacaacgagaagatctccgtgaagcgggtgtggctgaccgagatcaagctggccgacctggagaacatggtgaactacaagaacggccgggagatcgagctgtacgaggccctgaaggcccggctggaggcctacggcggcaacgccaagcaggccttcgaccccaaggacaaccccttctacaagaagggcggccagctggtgaaggccgtgcgggtggagaagacccaggagtccggcgtgctgctgaacaagaagaacgcctacaccatcgccgacaacggcgacatggtgcgggtggacgtgttctgcaaggtggacaagaagggcaagaaccagtacttcatcgtgcccatctacgcctggcaggtggccgagaacatcctgcccgacatcgactgcaagggctaccggatcgacgactcctacaccttctgcttctccctgcacaagtacgacctgatcgccttccagaaggacgagaagtccaaggtggagttcgcctactacatcaactgcgactcctccaacggccggttctacctggcctggcacgacaagggctccaaggagcagcagttccggatctccacccagaacctggtgctgatccagaagtaccaggtgaacgagctgggcaaggagatccggccctgccggctgaagaagcggccccccgtgcggtccggaaagcggaccgccgacggctccggaggaggaagcccgaagaagaagagaaaggtcagcgaaagcgcaacaccggaaagcgtcagcggatggagactgttcaagaagatcagctag

SEQ ID NO: 80 - protein, 2500 aa, synthetic construct
  REGION 1..2500: note = Synthetic: Cas9-Cas9 fusion -11 amino acid residue linker and HiBit tag (mRNA U)-amino acid sequence
MDKKYSIGLDIGTNSVGWAVITDEYKVPSKKFKVLGNTDRHSIKKNLIGALLFDSGETAEATRLKRTARRRYTRRKNRICYLQEIFSNEMAKVDDSFFHRLEESFLVEEDKKHERHPIFGNIVDEVAYHEKYPTIYHLRKKLVDSTDKADLRLIYLALAHMIKFRGHFLIEGDLNPDNSDVDKLFIQLVQTYNQLFEENPINASGVDAKAILSARLSKSRRLENLIAQLPGEKKNGLFGNLIALSLGLTPNFKSNFDLAEDAKLQLSKDTYDDDLDNLLAQIGDQYADLFLAAKNLSDAILLSDILRVNTEITKAPLSASMIKRYDEHHQDLTLLKALVRQQLPEKYKEIFFDQSKNGYAGYIDGGASQEEFYKFIKPILEKMDGTEELLVKLNREDLLRKQRTFDNGSIPHQIHLGELHAILRRQEDFYPFLKDNREKIEKILTFRIPYYVGPLARGNSRFAWMTRKSEETITPWNFEEVVDKGASAQSFIERMTNFDKNLPNEKVLPKHSLLYEYFTVYNELTKVKYVTEGMRKPAFLSGEQKKAIVDLLFKTNRKVTVKQLKEDYFKKIECFDSVEISGVEDRFNASLGTYHDLLKIIKDKDFLDNEENEDILEDIVLTLTLFEDREMIEERLKTYAHLFDDKVMKQLKRRRYTGWGRLSRKLINGIRDKQSGKTILDFLKSDGFANRNFMQLIHDDSLTFKEDIQKAQVSGQGDSLHEHIANLAGSPAIKKGILQTVKVVDELVKVMGRHKPENIVIEMARENQTTQKGQKNSRERMKRIEEGIKELGSQILKEHPVENTQLQNEKLYLYYLQNGRDMYVDQELDINRLSDYDVDHIVPQSFLKDDSIDNKVLTRSDKNRGKSDNVPSEEVVKKMKNYWRQLLNAKLITQRKFDNLTKAERGGLSELDKAGFIKRQLVETRQITKHVAQILDSRMNTKYDENDKLIREVKVITLKSKLVSDFRKDFQFYKVREINNYHHAHDAYLNAVVGTALIKKYPKLESEFVYGDYKVYDVRKMIAKSEQEIGKATAKYFFYSNIMNFFKTEITLANGEIRKRPLIETNGETGEIVWDKGRDFATVRKVLSMPQVNIVKKTEVQTGGFSKESILPKRNSDKLIARKKDWDPKKYGGFDSPTVAYSVLVVAKVEKGKSKKLKSVKELLGITIMERSSFEKNPIDFLEAKGYKEVKKDLIIKLPKYSLFELENGRKRMLASAGELQKGNELALPSKYVNFLYLASHYEKLKGSPEDNEQKQLFVEQHKHYLDEIIEQISEFSKRVILADANLDKVLSAYNKHRDKPIREQAENIIHLFTLTNLGAPAAFKYFDTTIDKKRYTSTKEVLDATLIHQSITGLYETRIDLSQLGGDGAPESATGSSSGAAFKPNPINYILGLDIGIASVGWAMVEIDEEENPIRLIDLGVRVFERAEVPKTGDSLAMARRLARSVRRLTRRRAHRLLRARRLLKREGVLQAADFDENGLIKSLPNTPWQLRAAALDRKLTPLEWSAVLLHLIKHRGYLSQRKNEGETADKELGALLKGVANNAHALQTGDFRTPAELALNKFEKESGHIRNQRGDYSHTFSRKDLQAELILLFEKQKEFGNPHVSGGLKEGIETLLMTQRPALSGDAVQKMLGHCTFEPAEPKAAKNTYTAERFIWLTKLNNLRILEQGSERPLTDTERATLMDEPYRKSKLTYAQARKLLGLEDTAFFKGLRYGKDNAEASTLMEMKAYHAISRALEKEGLKDKKSPLNLSSELQDEIGTAFSLFKTDEDITGRLKDRVQPEILEALLKHISFDKFVQISLKALRRIVPLMEQGKRYDEACAEIYGDHYGKKNTEEKIYLPPIPADEIRNPVVLRALSQARKVINGVVRRYGSPARIHIETAREVGKSFKDRKEIEKRQEENRKDREKAAAKFREYFPNFVGEPKSKDILKLRLYEQQHGKCLYSGKEINLVRLNEKGYVEIDHALPFSRTWDDSFNNKVLVLGSENQNKGNQTPYEYFNGKDNSREWQEFKARVETSRFPRSKKQRILLQKFDEDGFKECNLNDTRYVNRFLCQFVADHILLTGKGKRRVFASNGQITNLLRGFWGLRKVRAENDRHHALDAVVVACSTVAMQQKITRFVRYKEMNAFDGKTIDKETGKVLHQKTHFPQPWEFFAQEVMIRVFGKPDGKPEFEEADTPEKLRTLLAEKLSSRPEAVHEYVTPLFVSRAPNRKMSGAHKDTLRSAKRFVKHNEKISVKRVWLTEIKLADLENMVNYKNGREIELYEALKARLEAYGGNAKQAFDPKDNPFYKKGGQLVKAVRVEKTQESGVLLNKKNAYTIADNGDMVRVDVFCKVDKKGKNQYFIVPIYAWQVAENILPDIDCKGYRIDDSYTFCFSLHKYDLIAFQKDEKSKVEFAYYINCDSSNGRFYLAWHDKGSKEQQFRISTQNLVLIQKYQVNELGKEIRPCRLKKRPPVRSGKRTADGSGGGSPKKKRKVSESATPESVSGWRLFKKIS

SEQ ID NO: 81 - RNA, 7446 nt, synthetic construct
  misc_feature 1..7446: note = Synthetic: Cas9-Cas9 fusion -11 amino acid residual linker (mRNA U)-mRNA sequence
  source 1..7446: mol_type = other RNA
atggacaagaagtactccatcggcctggacatcggcaccaactccgtgggctgggccgtgatcaccgacgagtacaaggtgccctccaagaagttcaaggtgctgggcaacaccgaccggcactccatcaagaagaacctgatcggcgccctgctgttcgactccggcgagaccgccgaggccacccggctgaagcggaccgcccggcggcggtacacccggcggaagaaccggatctgctacctgcaggagatcttctccaacgagatggccaaggtggacgactccttcttccaccggctggaggagtccttcctggtggaggaggacaagaagcacgagcggcaccccatcttcggcaacatcgtggacgaggtggcctaccacgagaagtaccccaccatctaccacctgcggaagaagctggtggactccaccgacaaggccgacctgcggctgatctacctggccctggcccacatgatcaagttccggggccacttcctgatcgagggcgacctgaaccccgacaactccgacgtggacaagctgttcatccagctggtgcagacctacaaccagctgttcgaggagaaccccatcaacgcctccggcgtggacgccaaggccatcctgtccgcccggctgtccaagtcccggcggctggagaacctgatcgcccagctgcccggcgagaagaagaacggcctgttcggcaacctgatcgccctgtccctgggcctgacccccaacttcaagtccaacttcgacctggccgaggacgccaagctgcagctgtccaaggacacctacgacgacgacctggacaacctgctggcccagatcggcgaccagtacgccgacctgttcctggccgccaagaacctgtccgacgccatcctgctgtccgacatcctgcgggtgaacaccgagatcaccaaggcccccctgtccgcctccatgatcaagcggtacgacgagcaccaccaggacctgaccctgctgaaggccctggtgcggcagcagctgcccgagaagtacaaggagatcttcttcgaccagtccaagaacggctacgccggctacatcgacggcggcgcctcccaggaggagttctacaagttcatcaagcccatcctggagaagatggacggcaccgaggagctgctggtgaagctgaaccgggaggacctgctgcggaagcagcggaccttcgacaacggctccatcccccaccagatccacctgggcgagctgcacgccatcctgcggcggcaggaggacttctaccccttcctgaaggacaaccgggagaagatcgagaagatcctgaccttccggatcccctactacgtgggccccctggcccggggcaactcccggttcgcctggatgacccggaagtccgaggagaccatcaccccctggaacttcgaggaggtggtggacaagggcgcctccgcccagtccttcatcgagcggatgaccaacttcgacaagaacctgcccaacgagaaggtgctgcccaagcactccctgctgtacgagtacttcaccgtgtacaacgagctgaccaaggtgaagtacgtgaccgagggcatgcggaagcccgccttcctgtccggcgagcagaagaaggccatcgtggacctgctgttcaagaccaaccggaaggtgaccgtgaagcagctgaaggaggactacttcaagaagatcgagtgcttcgactccgtggagatctccggcgtggaggaccggttcaacgcctccctgggcacctaccacgacctgctgaagatcatcaaggacaaggacttcctggacaacgaggagaacgaggacatcctggaggacatcgtgctgaccctgaccctgttcgaggaccgggagatgatcgaggagcggctgaagacctacgcccacctgttcgacgacaaggtgatgaagcagctgaagcggcggcggtacaccggctggggccggctgtcccggaagctgatcaacggcatccgggacaagcagtccggcaagaccatcctggacttcctgaagtccgacggcttcgccaaccggaacttcatgcagctgatccacgacgactccctgaccttcaaggaggacatccagaaggcccaggtgtccggccagggcgactccctgcacgagcacatcgccaacctggccggctcccccgccatcaagaagggcatcctgcagaccgtgaaggtggtggacgagctggtgaaggtgatgggccggcacaagcccgagaacatcgtgatcgagatggcccgggagaaccagaccacccagaagggccagaagaactcccgggagcggatgaagcggatcgaggagggcatcaaggagctgggctcccagatcctgaaggagcaccccgtggagaacacccagctgcagaacgagaagctgtacctgtactacctgcagaacggccgggacatgtacgtggaccaggagctggacatcaaccggctgtccgactacgacgtggaccacatcgtgccccagtccttcctgaaggacgactccatcgacaacaaggtgctgacccggtccgacaagaaccggggcaagtccgacaacgtgccctccgaggaggtggtgaagaagatgaagaactactggcggcagctgctgaacgccaagctgatcacccagcggaagttcgacaacctgaccaaggccgagcggggcggcctgtccgagctggacaaggccggcttcatcaagcggcagctggtggagacccggcagatcaccaagcacgtggcccagatcctggactcccggatgaacaccaagtacgacgagaacgacaagctgatccgggaggtgaaggtgatcaccctgaagtccaagctggtgtccgacttccggaaggacttccagttctacaaggtgcgggagatcaacaactaccaccacgcccacgacgcctacctgaacgccgtggtgggcaccgccctgatcaagaagtaccccaagctggagtccgagttcgtgtacggcgactacaaggtgtacgacgtgcggaagatgatcgccaagtccgagcaggagatcggcaaggccaccgccaagtacttcttctactccaacatcatgaacttcttcaagaccgagatcaccctggccaacggcgagatccggaagcggcccctgatcgagaccaacggcgagaccggcgagatcgtgtgggacaagggccgggacttcgccaccgtgcggaaggtgctgtccatgccccaggtgaacatcgtgaagaagaccgaggtgcagaccggcggcttctccaaggagtccatcctgcccaagcggaactccgacaagctgatcgcccggaagaaggactgggaccccaagaagtacggcggcttcgactcccccaccgtggcctactccgtgctggtggtggccaaggtggagaagggcaagtccaagaagctgaagtccgtgaaggagctgctgggcatcaccatcatggagcggtcctccttcgagaagaaccccatcgacttcctggaggccaagggctacaaggaggtgaagaaggacctgatcatcaagctgcccaagtactccctgttcgagctggagaacggccggaagcggatgctggcctccgccggcgagctgcagaagggcaacgagctggccctgccctccaagtacgtgaacttcctgtacctggcctcccactacgagaagctgaagggctcccccgaggacaacgagcagaagcagctgttcgtggagcagcacaagcactacctggacgagatcatcgagcagatctccgagttctccaagcgggtgatcctggccgacgccaacctggacaaggtgctgtccgcctacaacaagcaccgggacaagcccatccgggagcaggccgagaacatcatccacctgttcaccctgaccaacctgggcgcccccgccgccttcaagtacttcgacaccaccatcgacaagaagcggtacacctccaccaaggaggtgctggacgccaccctgatccaccagtccatcaccggcctgtacgagacccggatcgacctgtcccagctgggcggcgacggcgcccccgagtccgccaccggctcctcctccggtgccgccttcaagcccaaccccatcaactacatcctgggcctggacatcggcatcgcctccgtgggctgggccatggtggagatcgacgaggaggagaaccccatccggctgatcgacctgggcgtgcgggtgttcgagcgggccgaggtgcccaagaccggcgactccctggccatggcccggcggctggcccggtccgtgcggcggctgacccggcggcgggcccaccggctgctgcgggcccggcggctgctgaagcgggagggcgtgctgcaggccgccgacttcgacgagaacggcctgatcaagtccctgcccaacaccccctggcagctgcgggccgccgccctggaccggaagctgacccccctggagtggtccgccgtgctgctgcacctgatcaagcaccggggctacctgtcccagcggaagaacgagggcgagaccgccgacaaggagctgggcgccctgctgaagggcgtggccaacaacgcccacgccctgcagaccggcgacttccggacccccgccgagctggccctgaacaagttcgagaaggagtccggccacatccggaaccagcggggcgactactcccacaccttctcccggaaggacctgcaggccgagctgatcctgctgttcgagaagcagaaggagttcggcaacccccacgtgtccggcggcctgaaggagggcatcgagaccctgctgatgacccagcggcccgccctgtccggcgacgccgtgcagaagatgctgggccactgcaccttcgagcccgccgagcccaaggccgccaagaacacctacaccgccgagcggttcatctggctgaccaagctgaacaacctgcggatcctggagcagggctccgagcggcccctgaccgacaccgagcgggccaccctgatggacgagccctaccggaagtccaagctgacctacgcccaggcccggaagctgctgggcctggaggacaccgccttcttcaagggcctgcggtacggcaaggacaacgccgaggcctccaccctgatggagatgaaggcctaccacgccatctcccgggccctggagaaggagggcctgaaggacaagaagtcccccctgaacctgtcctccgagctgcaggacgagatcggcaccgccttctccctgttcaagaccgacgaggacatcaccggccggctgaaggaccgggtgcagcccgagatcctggaggccctgctgaagcacatctccttcgacaagttcgtgcagatctccctgaaggccctgcggcggatcgtgcccctgatggagcagggcaagcggtacgacgaggcctgcgccgagatctacggcgaccactacggcaagaagaacaccgaggagaagatctacctgccccccatccccgccgacgagatccggaaccccgtggtgctgcgggccctgtcccaggcccggaaggtgatcaacggcgtggtgcggcggtacggctcccccgcccggatccacatcgagaccgcccgggaggtgggcaagtccttcaaggaccggaaggagatcgagaagcggcaggaggagaaccggaaggaccgggagaaggccgccgccaagttccgggagtacttccccaacttcgtgggcgagcccaagtccaaggacatcctgaagctgcggctgtacgagcagcagcacggcaagtgcctgtactccggcaaggagatcaacctggtgcggctgaacgagaagggctacgtggagatcgaccacgccctgcccttctcccggacctgggacgactccttcaacaacaaggtgctggtgctgggctccgagaaccagaacaagggcaaccagaccccctacgagtacttcaacggcaaggacaactcccgggagtggcaggagttcaaggcccgggtggagacctcccggttcccccggtccaagaagcagcggatcctgctgcagaagttcgacgaggacggcttcaaggagtgcaacctgaacgacacccggtacgtgaaccgcttcctgtgccagttcgtggccgaccacatcctgctgaccggcaagggcaagcggcgggtgttcgcctccaacggccagatcaccaacctgctgcggggcttctggggcctgcggaaggtgcgggccgagaacgaccggcaccacgccctggacgccgtggtggtggcctgctccaccgtggccatgcagcagaagatcacccggttcgtgcggtacaaggagatgaacgccttcgacggcaagaccatcgacaaggagaccggcaaggtgctgcaccagaagacccacttcccccagccctgggagttcttcgcccaggaggtgatgatccgggtgttcggcaagcccgacggcaagcccgagttcgaggaggccgacacccccgagaagctgcggaccctgctggccgagaagctgtcctcccggcccgaggccgtgcacgagtacgtgacccccctgttcgtgtcccgggcccccaaccggaagatgtccggcgcccacaaggacaccctgcggtccgccaagcggttcgtgaagcacaacgagaagatctccgtgaagcgggtgtggctgaccgagatcaagctggccgacctggagaacatggtgaactacaagaacggccgggagatcgagctgtacgaggccctgaaggcccggctggaggcctacggcggcaacgccaagcaggccttcgaccccaaggacaaccccttctacaagaagggcggccagctggtgaaggccgtgcgggtggagaagacccaggagtccggcgtgctgctgaacaagaagaacgcctacaccatcgccgacaacggcgacatggtgcgggtggacgtgttctgcaaggtggacaagaagggcaagaaccagtacttcatcgtgcccatctacgcctggcaggtggccgagaacatcctgcccgacatcgactgcaagggctaccggatcgacgactcctacaccttctgcttctccctgcacaagtacgacctgatcgccttccagaaggacgagaagtccaaggtggagttcgcctactacatcaactgcgactcctccaacggccggttctacctggcctggcacgacaagggctccaaggagcagcagttccggatctccacccagaacctggtgctgatccagaagtaccaggtgaacgagctgggcaaggagatccggccctgccggctgaagaagcggccccccgtgcggtccggaaagcggaccgccgacggctccggaggaggaagcccgaagaagaagagaaaggtctag

SEQ ID NO: 82 - protein, 2481 aa, synthetic construct
  REGION 1..2481: note = Synthetic: Cas9-Cas9 fusion -11 amino acid residual linker (mRNA U)-amino acid sequence
MDKKYSIGLDIGTNSVGWAVITDEYKVPSKKFKVLGNTDRHSIKKNLIGALLFDSGETAEATRLKRTARRRYTRRKNRICYLQEIFSNEMAKVDDSFFHRLEESFLVEEDKKHERHPIFGNIVDEVAYHEKYPTIYHLRKKLVDSTDKADLRLIYLALAHMIKFRGHFLIEGDLNPDNSDVDKLFIQLVQTYNQLFEENPINASGVDAKAILSARLSKSRRLENLIAQLPGEKKNGLFGNLIALSLGLTPNFKSNFDLAEDAKLQLSKDTYDDDLDNLLAQIGDQYADLFLAAKNLSDAILLSDILRVNTEITKAPLSASMIKRYDEHHQDLTLLKALVRQQLPEKYKEIFFDQSKNGYAGYIDGGASQEEFYKFIKPILEKMDGTEELLVKLNREDLLRKQRTFDNGSIPHQIHLGELHAILRRQEDFYPFLKDNREKIEKILTFRIPYYVGPLARGNSRFAWMTRKSEETITPWNFEEVVDKGASAQSFIERMTNFDKNLPNEKVLPKHSLLYEYFTVYNELTKVKYVTEGMRKPAFLSGEQKKAIVDLLFKTNRKVTVKQLKEDYFKKIECFDSVEISGVEDRFNASLGTYHDLLKIIKDKDFLDNEENEDILEDIVLTLTLFEDREMIEERLKTYAHLFDDKVMKQLKRRRYTGWGRLSRKLINGIRDKQSGKTILDFLKSDGFANRNFMQLIHDDSLTFKEDIQKAQVSGQGDSLHEHIANLAGSPAIKKGILQTVKVVDELVKVMGRHKPENIVIEMARENQTTQKGQKNSRERMKRIEEGIKELGSQILKEHPVENTQLQNEKLYLYYLQNGRDMYVDQELDINRLSDYDVDHIVPQSFLKDDSIDNKVLTRSDKNRGKSDNVPSEEVVKKMKNYWRQLLNAKLITQRKFDNLTKAERGGLSELDKAGFIKRQLVETRQITKHVAQILDSRMNTKYDENDKLIREVKVITLKSKLVSDFRKDFQFYKVREINNYHHAHDAYLNAVVGTALIKKYPKLESEFVYGDYKVYDVRKMIAKSEQEIGKATAKYFFYSNIMNFFKTEITLANGEIRKRPLIETNGETGEIVWDKGRDFATVRKVLSMPQVNIVKKTEVQTGGFSKESILPKRNSDKLIARKKDWDPKKYGGFDSPTVAYSVLVVAKVEKGKSKKLKSVKELLGITIMERSSFEKNPIDFLEAKGYKEVKKDLIIKLPKYSLFELENGRKRMLASAGELQKGNELALPSKYVNFLYLASHYEKLKGSPEDNEQKQLFVEQHKHYLDEIIEQISEFSKRVILADANLDKVLSAYNKHRDKPIREQAENIIHLFTLTNLGAPAAFKYFDTTIDKKRYTSTKEVLDATLIHQSITGLYETRIDLSQLGGDGAPESATGSSSGAAFKPNPINYILGLDIGIASVGWAMVEIDEEENPIRLIDLGVRVFERAEVPKTGDSLAMARRLARSVRRLTRRRAHRLLRARRLLKREGVLQAADFDENGLIKSLPNTPWQLRAAALDRKLTPLEWSAVLLHLIKHRGYLSQRKNEGETADKELGALLKGVANNAHALQTGDFRTPAELALNKFEKESGHIRNQRGDYSHTFSRKDLQAELILLFEKQKEFGNPHVSGGLKEGIETLLMTQRPALSGDAVQKMLGHCTFEPAEPKAAKNTYTAERFIWLTKLNNLRILEQGSERPLTDTERATLMDEPYRKSKLTYAQARKLLGLEDTAFFKGLRYGKDNAEASTLMEMKAYHAISRALEKEGLKDKKSPLNLSSELQDEIGTAFSLFKTDEDITGRLKDRVQPEILEALLKHISFDKFVQISLKALRRIVPLMEQGKRYDEACAEIYGDHYGKKNTEEKIYLPPIPADEIRNPVVLRALSQARKVINGVVRRYGSPARIHIETAREVGKSFKDRKEIEKRQEENRKDREKAAAKFREYFPNFVGEPKSKDILKLRLYEQQHGKCLYSGKEINLVRLNEKGYVEIDHALPFSRTWDDSFNNKVLVLGSENQNKGNQTPYEYFNGKDNSREWQEFKARVETSRFPRSKKQRILLQKFDEDGFKECNLNDTRYVNRFLCQFVADHILLTGKGKRRVFASNGQITNLLRGFWGLRKVRAENDRHHALDAVVVACSTVAMQQKITRFVRYKEMNAFDGKTIDKETGKVLHQKTHFPQPWEFFAQEVMIRVFGKPDGKPEFEEADTPEKLRTLLAEKLSSRPEAVHEYVTPLFVSRAPNRKMSGAHKDTLRSAKRFVKHNEKISVKRVWLTEIKLADLENMVNYKNGREIELYEALKARLEAYGGNAKQAFDPKDNPFYKKGGQLVKAVRVEKTQESGVLLNKKNAYTIADNGDMVRVDVFCKVDKKGKNQYFIVPIYAWQVAENILPDIDCKGYRIDDSYTFCFSLHKYDLIAFQKDEKSKVEFAYYINCDSSNGRFYLAWHDKGSKEQQFRISTQNLVLIQKYQVNELGKEIRPCRLKKRPPVRSGKRTADGSGGGSPKKKRKV

SEQ ID NO: 83 - RNA, 7883 nt, synthetic construct
  misc_feature 1..7883: note = Synthetic: Cas9-Cas9 fusion -81 amino acid residue linker and HiBit tag-SpyCas9 without Rec2 domain (mRNA V) -mRNA sequence
  source 1..7883: mol_type = other RNA
gggaagctcagaataaacgctcaactttggccggatctgccaccatggacaagaagtactccatcggcctggacatcggcaccaactccgtgggctgggccgtgatcaccgacgagtacaaggtgccctccaagaagttcaaggtgctgggcaacaccgaccggcactccatcaagaagaacctgatcggcgccctgctgttcgactccggcgagaccgccgaggccacccggctgaagcggaccgcccggcggcggtacacccggcggaagaaccggatctgctacctgcaggagatcttctccaacgagatggccaaggtggacgactccttcttccaccggctggaggagtccttcctggtggaggaggacaagaagcacgagcggcaccccatcttcggcaacatcgtggacgaggtggcctaccacgagaagtaccccaccatctaccacctgcggaagaagctggtggactccaccgacaaggccgacctgcggctgatctacctggccctggcccacatgatcaagttccggggccacttcctgatcgagggcgacctgggcggcggcggctccaccgagatcaccaaggcccccctgtccgcctccatgatcaagcggtacgacgagcaccaccaggacctgaccctgctgaaggccctggtgcggcagcagctgcccgagaagtacaaggagatcttcttcgaccagtccaagaacggctacgccggctacatcgacggcggcgcctcccaggaggagttctacaagttcatcaagcccatcctggagaagatggacggcaccgaggagctgctggtgaagctgaaccgggaggacctgctgcggaagcagcggaccttcgacaacggctccatcccccaccagatccacctgggcgagctgcacgccatcctgcggcggcaggaggacttctaccccttcctgaaggacaaccgggagaagatcgagaagatcctgaccttccggatcccctactacgtgggccccctggcccggggcaactcccggttcgcctggatgacccggaagtccgaggagaccatcaccccctggaacttcgaggaggtggtggacaagggcgcctccgcccagtccttcatcgagcggatgaccaacttcgacaagaacctgcccaacgagaaggtgctgcccaagcactccctgctgtacgagtacttcaccgtgtacaacgagctgaccaaggtgaagtacgtgaccgagggcatgcggaagcccgccttcctgtccggcgagcagaagaaggccatcgtggacctgctgttcaagaccaaccggaaggtgaccgtgaagcagctgaaggaggactacttcaagaagatcgagtgcttcgactccgtggagatctccggcgtggaggaccggttcaacgcctccctgggcacctaccacgacctgctgaagatcatcaaggacaaggacttcctggacaacgaggagaacgaggacatcctggaggacatcgtgctgaccctgaccctgttcgaggaccgggagatgatcgaggagcggctgaagacctacgcccacctgttcgacgacaaggtgatgaagcagctgaagcggcggcggtacaccggctggggccggctgtcccggaagctgatcaacggcatccgggacaagcagtccggcaagaccatcctggacttcctgaagtccgacggcttcgccaaccggaacttcatgcagctgatccacgacgactccctgaccttcaaggaggacatccagaaggcccaggtgtccggccagggcgactccctgcacgagcacatcgccaacctggccggctcccccgccatcaagaagggcatcctgcagaccgtgaaggtggtggacgagctggtgaaggtgatgggccggcacaagcccgagaacatcgtgatcgagatggcccgggagaaccagaccacccagaagggccagaagaactcccgggagcggatgaagcggatcgaggagggcatcaaggagctgggctcccagatcctgaaggagcaccccgtggagaacacccagctgcagaacgagaagctgtacctgtactacctgcagaacggccgggacatgtacgtggaccaggagctggacatcaaccggctgtccgactacgacgtggaccacatcgtgccccagtccttcctgaaggacgactccatcgacaacaaggtgctgacccggtccgacaagaaccggggcaagtccgacaacgtgccctccgaggaggtggtgaagaagatgaagaactactggcggcagctgctgaacgccaagctgatcacccagcggaagttcgacaacctgaccaaggccgagcggggcggcctgtccgagctggacaaggccggcttcatcaagcggcagctggtggagacccggcagatcaccaagcacgtggcccagatcctggactcccggatgaacaccaagtacgacgagaacgacaagctgatccgggaggtgaaggtgatcaccctgaagtccaagctggtgtccgacttccggaaggacttccagttctacaaggtgcgggagatcaacaactaccaccacgcccacgacgcctacctgaacgccgtggtgggcaccgccctgatcaagaagtaccccaagctggagtccgagttcgtgtacggcgactacaaggtgtacgacgtgcggaagatgatcgccaagtccgagcaggagatcggcaaggccaccgccaagtacttcttctactccaacatcatgaacttcttcaagaccgagatcaccctggccaacggcgagatccggaagcggcccctgatcgagaccaacggcgagaccggcgagatcgtgtgggacaagggccgggacttcgccaccgtgcggaaggtgctgtccatgccccaggtgaacatcgtgaagaagaccgaggtgcagaccggcggcttctccaaggagtccatcctgcccaagcggaactccgacaagctgatcgcccggaagaaggactgggaccccaagaagtacggcggcttcgactcccccaccgtggcctactccgtgctggtggtggccaaggtggagaagggcaagtccaagaagctgaagtccgtgaaggagctgctgggcatcaccatcatggagcggtcctccttcgagaagaaccccatcgacttcctggaggccaagggctacaaggaggtgaagaaggacctgatcatcaagctgcccaagtactccctgttcgagctggagaacggccggaagcggatgctggcctccgccggcgagctgcagaagggcaacgagctggccctgccctccaagtacgtgaacttcctgtacctggcctcccactacgagaagctgaagggctcccccgaggacaacgagcagaagcagctgttcgtggagcagcacaagcactacctggacgagatcatcgagcagatctccgagttctccaagcgggtgatcctggccgacgccaacctggacaaggtgctgtccgcctacaacaagcaccgggacaagcccatccgggagcaggccgagaacatcatccacctgttcaccctgaccaacctgggcgcccccgccgccttcaagtacttcgacaccaccatcgacaagaagcggtacacctccaccaaggaggtgctggacgccaccctgatccaccagtccatcaccggcctgtacgagacccggatcgacctgtcccagctgggcggcgacggcgcccccgagtccgccaccgagtccggcggcacctccaccgagtccgagggctccgccggcacctccaccgagtccgagggctccgccggctccgccggctccacctccaccgaggagggcacctccaccgagtccgagggctccgccggcacctccaccgagtccgagggctccgccggcacctccgagtccgccaccgagtccggcggcacctccaccgagtccgagggctcctcctccggtgccgccttcaagcccaaccccatcaactacatcctgggcctggacatcggcatcgcctccgtgggctgggccatggtggagatcgacgaggaggagaaccccatccggctgatcgacctgggcgtgcgggtgttcgagcgggccgaggtgcccaagaccggcgactccctggccatggcccggcggctggcccggtccgtgcggcggctgacccggcggcgggcccaccggctgctgcgggcccggcggctgctgaagcgggagggcgtgctgcaggccgccgacttcgacgagaacggcctgatcaagtccctgcccaacaccccctggcagctgcgggccgccgccctggaccggaagctgacccccctggagtggtccgccgtgctgctgcacctgatcaagcaccggggctacctgtcccagcggaagaacgagggcgagaccgccgacaaggagctgggcgccctgctgaagggcgtggccaacaacgcccacgccctgcagaccggcgacttccggacccccgccgagctggccctgaacaagttcgagaaggagtccggccacatccggaaccagcggggcgactactcccacaccttctcccggaaggacctgcaggccgagctgatcctgctgttcgagaagcagaaggagttcggcaacccccacgtgtccggcggcctgaaggagggcatcgagaccctgctgatgacccagcggcccgccctgtccggcgacgccgtgcagaagatgctgggccactgcaccttcgagcccgccgagcccaaggccgccaagaacacctacaccgccgagcggttcatctggctgaccaagctgaacaacctgcggatcctggagcagggctccgagcggcccctgaccgacaccgagcgggccaccctgatggacgagccctaccggaagtccaagctgacctacgcccaggcccggaagctgctgggcctggaggacaccgccttcttcaagggcctgcggtacggcaaggacaacgccgaggcctccaccctgatggagatgaaggcctaccacgccatctcccgggccctggagaaggagggcctgaaggacaagaagtcccccctgaacctgtcctccgagctgcaggacgagatcggcaccgccttctccctgttcaagaccgacgaggacatcaccggccggctgaaggaccgggtgcagcccgagatcctggaggccctgctgaagcacatctccttcgacaagttcgtgcagatctccctgaaggccctgcggcggatcgtgcccctgatggagcagggcaagcggtacgacgaggcctgcgccgagatctacggcgaccactacggcaagaagaacaccgaggagaagatctacctgccccccatccccgccgacgagatccggaaccccgtggtgctgcgggccctgtcccaggcccggaaggtgatcaacggcgtggtgcggcggtacggctcccccgcccggatccacatcgagaccgcccgggaggtgggcaagtccttcaaggaccggaaggagatcgagaagcggcaggaggagaaccggaaggaccgggagaaggccgccgccaagttccgggagtacttccccaacttcgtgggcgagcccaagtccaaggacatcctgaagctgcggctgtacgagcagcagcacggcaagtgcctgtactccggcaaggagatcaacctggtgcggctgaacgagaagggctacgtggagatcgaccacgccctgcccttctcccggacctgggacgactccttcaacaacaaggtgctggtgctgggctccgagaaccagaacaagggcaaccagaccccctacgagtacttcaacggcaaggacaactcccgggagtggcaggagttcaaggcccgggtggagacctcccggttcccccggtccaagaagcagcggatcctgctgcagaagttcgacgaggacggcttcaaggagtgcaacctgaacgacacccggtacgtgaaccgcttcctgtgccagttcgtggccgaccacatcctgctgaccggcaagggcaagcggcgggtgttcgcctccaacggccagatcaccaacctgctgcggggcttctggggcctgcggaaggtgcgggccgagaacgaccggcaccacgccctggacgccgtggtggtggcctgctccaccgtggccatgcagcagaagatcacccggttcgtgcggtacaaggagatgaacgccttcgacggcaagaccatcgacaaggagaccggcaaggtgctgcaccagaagacccacttcccccagccctgggagttcttcgcccaggaggtgatgatccgggtgttcggcaagcccgacggcaagcccgagttcgaggaggccgacacccccgagaagctgcggaccctgctggccgagaagctgtcctcccggcccgaggccgtgcacgagtacgtgacccccctgttcgtgtcccgggcccccaaccggaagatgtccggcgcccacaaggacaccctgcggtccgccaagcggttcgtgaagcacaacgagaagatctccgtgaagcgggtgtggctgaccgagatcaagctggccgacctggagaacatggtgaactacaagaacggccgggagatcgagctgtacgaggccctgaaggcccggctggaggcctacggcggcaacgccaagcaggccttcgaccccaaggacaaccccttctacaagaagggcggccagctggtgaaggccgtgcgggtggagaagacccaggagtccggcgtgctgctgaacaagaagaacgcctacaccatcgccgacaacggcgacatggtgcgggtggacgtgttctgcaaggtggacaagaagggcaagaaccagtacttcatcgtgcccatctacgcctggcaggtggccgagaacatcctgcccgacatcgactgcaagggctaccggatcgacgactcctacaccttctgcttctccctgcacaagtacgacctgatcgccttccagaaggacgagaagtccaaggtggagttcgcctactacatcaactgcgactcctccaacggccggttctacctggcctggcacgacaagggctccaaggagcagcagttccggatctccacccagaacctggtgctgatccagaagtaccaggtgaacgagctgggcaaggagatccggccctgccggctgaagaagcggccccccgtgcggtccggaaagcggaccgccgacggctccggaggaggaagcccgaagaagaagagaaaggtcagcgaaagcgcaacaccggaaagcgtcagcggatggagactgttcaagaagatcagctagctagcaccagcctcaagaacacccgaatggagtctctaagctacataataccaacttacactttacaaaatgttgtcccccaaaatgtagccattcgtatctgctcctaataaaaagaaagtttcttcacattctctcgagaaaaaaaaaaaatggaaaaaaaaaaaacggaaaaaaaaaaaaggtaaaaaaaaaaaatataaaaaaaaaaaacataaaaaaaaaaaacgaaaaaaaaaaaacgtaaaaaaaaaaaactcaaaaaaaaaaaagataaaaaaaaaaaacctaaaaaaaaaaaatgtaaaaaaaaaaaagggaaaaaaaaaaaacgcaaaaaaaaaaaacacaaaaaaaaaaaatgcaaaaaaaaaaaatcgaaaaaaaaaaaatctaaaaaaaaaaaacgaaaaaaaaaaaacccaaaaaaaaaaaagacaaaaaaaaaaaatagaaaaaaaaaaaagttaaaaaaaaaaaactgaaaaaaaaaaaatttaaaaaaaaaaaatctag

SEQ ID NO: 84 - RNA, 7323 nt, synthetic construct
  misc_feature 1..7323: note = Synthetic: Cas9-Cas9 fusion -81 amino acid residue linker and HiBit tag-SpyCas9 without Rec2 domain (mRNA V) -ORF sequence
  source 1..7323: mol_type = other RNA
atggacaagaagtactccatcggcctggacatcggcaccaactccgtgggctgggccgtgatcaccgacgagtacaaggtgccctccaagaagttcaaggtgctgggcaacaccgaccggcactccatcaagaagaacctgatcggcgccctgctgttcgactccggcgagaccgccgaggccacccggctgaagcggaccgcccggcggcggtacacccggcggaagaaccggatctgctacctgcaggagatcttctccaacgagatggccaaggtggacgactccttcttccaccggctggaggagtccttcctggtggaggaggacaagaagcacgagcggcaccccatcttcggcaacatcgtggacgaggtggcctaccacgagaagtaccccaccatctaccacctgcggaagaagctggtggactccaccgacaaggccgacctgcggctgatctacctggccctggcccacatgatcaagttccggggccacttcctgatcgagggcgacctgggcggcggcggctccaccgagatcaccaaggcccccctgtccgcctccatgatcaagcggtacgacgagcaccaccaggacctgaccctgctgaaggccctggtgcggcagcagctgcccgagaagtacaaggagatcttcttcgaccagtccaagaacggctacgccggctacatcgacggcggcgcctcccaggaggagttctacaagttcatcaagcccatcctggagaagatggacggcaccgaggagctgctggtgaagctgaaccgggaggacctgctgcggaagcagcggaccttcgacaacggctccatcccccaccagatccacctgggcgagctgcacgccatcctgcggcggcaggaggacttctaccccttcctgaaggacaaccgggagaagatcgagaagatcctgaccttccggatcccctactacgtgggccccctggcccggggcaactcccggttcgcctggatgacccggaagtccgaggagaccatcaccccctggaacttcgaggaggtggtggacaagggcgcctccgcccagtccttcatcgagcggatgaccaacttcgacaagaacctgcccaacgagaaggtgctgcccaagcactccctgctgtacgagtacttcaccgtgtacaacgagctgaccaaggtgaagtacgtgaccgagggcatgcggaagcccgccttcctgtccggcgagcagaagaaggccatcgtggacctgctgttcaagaccaaccggaaggtgaccgtgaagcagctgaaggaggactacttcaagaagatcgagtgcttcgactccgtggagatctccggcgtggaggaccggttcaacgcctccctgggcacctaccacgacctgctgaagatcatcaaggacaaggacttcctggacaacgaggagaacgaggacatcctggaggacatcgtgctgaccctgaccctgttcgaggaccgggagatgatcgaggagcggctgaagacctacgcccacctgttcgacgacaaggtgatgaagcagctgaagcggcggcggtacaccggctggggccggctgtcccggaagctgatcaacggcatccgggacaagcagtccggcaagaccatcctggacttcctgaagtccgacggcttcgccaaccggaacttcatgcagctgatccacgacgactccctgaccttcaaggaggacatccagaaggcccaggtgtccggccagggcgactccctgcacgagcacatcgccaacctggccggctcccccgccatcaagaagggcatcctgcagaccgtgaaggtggtggacgagctggtgaaggtgatgggccggcacaagcccgagaacatcgtgatcgagatggcccgggagaaccagaccacccagaagggccagaagaactcccgggagcggatgaagcggatcgaggagggcatcaaggagctgggctcccagatcctgaaggagcaccccgtggagaacacccagctgcagaacgagaagctgtacctgtactacctgcagaacggccgggacatgtacgtggaccaggagctggacatcaaccggctgtccgactacgacgtggaccacatcgtgccccagtccttcctgaaggacgactccatcgacaacaaggtgctgacccggtccgacaagaaccggggcaagtccgacaacgtgccctccgaggaggtggtgaagaagatgaagaactactggcggcagctgctgaacgccaagctgatcacccagcggaagttcgacaacctgaccaaggccgagcggggcggcctgtccgagctggacaaggccggcttcatcaagcggcagctggtggagacccggcagatcaccaagcacgtggcccagatcctggactcccggatgaacaccaagtacgacgagaacgacaagctgatccgggaggtgaaggtgatcaccctgaagtccaagctggtgtccgacttccggaaggacttccagttctacaaggtgcgggagatcaacaactaccaccacgcccacgacgcctacctgaacgccgtggtgggcaccgccctgatcaagaagtaccccaagctggagtccgagttcgtgtacggcgactacaaggtgtacgacgtgcggaagatgatcgccaagtccgagcaggagatcggcaaggccaccgccaagtacttcttctactccaacatcatgaacttcttcaagaccgagatcaccctggccaacggcgagatccggaagcggcccctgatcgagaccaacggcgagaccggcgagatcgtgtgggacaagggccgggacttcgccaccgtgcggaaggtgctgtccatgccccaggtgaacatcgtgaagaagaccgaggtgcagaccggcggcttctccaaggagtccatcctgcccaagcggaactccgacaagctgatcgcccggaagaaggactgggaccccaagaagtacggcggcttcgactcccccaccgtggcctactccgtgctggtggtggccaaggtggagaagggcaagtccaagaagctgaagtccgtgaaggagctgctgggcatcaccatcatggagcggtcctccttcgagaagaaccccatcgacttcctggaggccaagggctacaaggaggtgaagaaggacctgatcatcaagctgcccaagtactccctgttcgagctggagaacggccggaagcggatgctggcctccgccggcgagctgcagaagggcaacgagctggccctgccctccaagtacgtgaacttcctgtacctggcctcccactacgagaagctgaagggctcccccgaggacaacgagcagaagcagctgttcgtggagcagcacaagcactacctggacgagatcatcgagcagatctccgagttctccaagcgggtgatcctggccgacgccaacctggacaaggtgctgtccgcctacaacaagcaccgggacaagcccatccgggagcaggccgagaacatcatccacctgttcaccctgaccaacctgggcgcccccgccgccttcaagtacttcgacaccaccatcgacaagaagcggtacacctccaccaaggaggtgctggacgccaccctgatccaccagtccatcaccggcctgtacgagacccggatcgacctgtcccagctgggcggcgacggcgcccccgagtccgccaccgagtccggcggcacctccaccgagtccgagggctccgccggcacctccaccgagtccgagggctccgccggctccgccggctccacctccaccgaggagggcacctccaccgagtccgagggctccgccggcacctccaccgagtccgagggctccgccggcacctccgagtccgccaccgagtccggcggcacctccaccgagtccgagggctcctcctccggtgccgccttcaagcccaaccccatcaactacatcctgggcctggacatcggcatcgcctccgtgggctgggccatggtggagatcgacgaggaggagaaccccatccggctgatcgacctgggcgtgcgggtgttcgagcgggccgaggtgcccaagaccggcgactccctggccatggcccggcggctggcccggtccgtgcggcggctgacccggcggcgggcccaccggctgctgcgggcccggcggctgctgaagcgggagggcgtgctgcaggccgccgacttcgacgagaacggcctgatcaagtccctgcccaacaccccctggcagctgcgggccgccgccctggaccggaagctgacccccctggagtggtccgccgtgctgctgcacctgatcaagcaccggggctacctgtcccagcggaagaacgagggcgagaccgccgacaaggagctgggcgccctgctgaagggcgtggccaacaacgcccacgccctgcagaccggcgacttccggacccccgccgagctggccctgaacaagttcgagaaggagtccggccacatccggaaccagcggggcgactactcccacaccttctcccggaaggacctgcaggccgagctgatcctgctgttcgagaagcagaaggagttcggcaacccccacgtgtccggcggcctgaaggagggcatcgagaccctgctgatgacccagcggcccgccctgtccggcgacgccgtgcagaagatgctgggccactgcaccttcgagcccgccgagcccaaggccgccaagaacacctacaccgccgagcggttcatctggctgaccaagctgaacaacctgcggatcctggagcagggctccgagcggcccctgaccgacaccgagcgggccaccctgatggacgagccctaccggaagtccaagctgacctacgcccaggcccggaagctgctgggcctggaggacaccgccttcttcaagggcctgcggtacggcaaggacaacgccgaggcctccaccctgatggagatgaaggcctaccacgccatctcccgggccctggagaaggagggcctgaaggacaagaagtcccccctgaacctgtcctccgagctgcaggacgagatcggcaccgccttctccctgttcaagaccgacgaggacatcaccggccggctgaaggaccgggtgcagcccgagatcctggaggccctgctgaagcacatctccttcgacaagttcgtgcagatctccctgaaggccctgcggcggatcgtgcccctgatggagcagggcaagcggtacgacgaggcctgcgccgagatctacggcgaccactacggcaagaagaacaccgaggagaagatctacctgccccccatccccgccgacgagatccggaaccccgtggtgctgcgggccctgtcccaggcccggaaggtgatcaacggcgtggtgcggcggtacggctcccccgcccggatccacatcgagaccgcccgggaggtgggcaagtccttcaaggaccggaaggagatcgagaagcggcaggaggagaaccggaaggaccgggagaaggccgccgccaagttccgggagtacttccccaacttcgtgggcgagcccaagtccaaggacatcctgaagctgcggctgtacgagcagcagcacggcaagtgcctgtactccggcaaggagatcaacctggtgcggctgaacgagaagggctacgtggagatcgaccacgccctgcccttctcccggacctgggacgactccttcaacaacaaggtgctggtgctgggctccgagaaccagaacaagggcaaccagaccccctacgagtacttcaacggcaaggacaactcccgggagtggcaggagttcaaggcccgggtggagacctcccggttcccccggtccaagaagcagcggatcctgctgcagaagttcgacgaggacggcttcaaggagtgcaacctgaacgacacccggtacgtgaaccgcttcctgtgccagttcgtggccgaccacatcctgctgaccggcaagggcaagcggcgggtgttcgcctccaacggccagatcaccaacctgctgcggggcttctggggcctgcggaaggtgcgggccgagaacgaccggcaccacgccctggacgccgtggtggtggcctgctccaccgtggccatgcagcagaagatcacccggttcgtgcggtacaaggagatgaacgccttcgacggcaagaccatcgacaaggagaccggcaaggtgctgcaccagaagacccacttcccccagccctgggagttcttcgcccaggaggtgatgatccgggtgttcggcaagcccgacggcaagcccgagttcgaggaggccgacacccccgagaagctgcggaccctgctggccgagaagctgtcctcccggcccgaggccgtgcacgagtacgtgacccccctgttcgtgtcccgggcccccaaccggaagatgtccggcgcccacaaggacaccctgcggtccgccaagcggttcgtgaagcacaacgagaagatctccgtgaagcgggtgtggctgaccgagatcaagctggccgacctggagaacatggtgaactacaagaacggccgggagatcgagctgtacgaggccctgaaggcccggctggaggcctacggcggcaacgccaagcaggccttcgaccccaaggacaaccccttctacaagaagggcggccagctggtgaaggccgtgcgggtggagaagacccaggagtccggcgtgctgctgaacaagaagaacgcctacaccatcgccgacaacggcgacatggtgcgggtggacgtgttctgcaaggtggacaagaagggcaagaaccagtacttcatcgtgcccatctacgcctggcaggtggccgagaacatcctgcccgacatcgactgcaagggctaccggatcgacgactcctacaccttctgcttctccctgcacaagtacgacctgatcgccttccagaaggacgagaagtccaaggtggagttcgcctactacatcaactgcgactcctccaacggccggttctacctggcctggcacgacaagggctccaaggagcagcagttccggatctccacccagaacctggtgctgatccagaagtaccaggtgaacgagctgggcaaggagatccggccctgccggctgaagaagcggccccccgtgcggtccggaaagcggaccgccgacggctccggaggaggaagcccgaagaagaagagaaaggtcagcgaaagcgcaacaccggaaagcgtcagcggatggagactgttcaagaagatcagctag

SEQ ID NO: 85 - protein, 2440 aa, synthetic construct
  REGION 1..2440: note = Synthetic: Cas9-Cas9 fusion -81 amino acid residue linker and HiBit tag-SpyCas9 without Rec2 domain (mRNA V) -amino acid sequence
MDKKYSIGLDIGTNSVGWAVITDEYKVPSKKFKVLGNTDRHSIKKNLIGALLFDSGETAEATRLKRTARRRYTRRKNRICYLQEIFSNEMAKVDDSFFHRLEESFLVEEDKKHERHPIFGNIVDEVAYHEKYPTIYHLRKKLVDSTDKADLRLIYLALAHMIKFRGHFLIEGDLGGGGSTEITKAPLSASMIKRYDEHHQDLTLLKALVRQQLPEKYKEIFFDQSKNGYAGYIDGGASQEEFYKFIKPILEKMDGTEELLVKLNREDLLRKQRTFDNGSIPHQIHLGELHAILRRQEDFYPFLKDNREKIEKILTFRIPYYVGPLARGNSRFAWMTRKSEETITPWNFEEVVDKGASAQSFIERMTNFDKNLPNEKVLPKHSLLYEYFTVYNELTKVKYVTEGMRKPAFLSGEQKKAIVDLLFKTNRKVTVKQLKEDYFKKIECFDSVEISGVEDRFNASLGTYHDLLKIIKDKDFLDNEENEDILEDIVLTLTLFEDREMIEERLKTYAHLFDDKVMKQLKRRRYTGWGRLSRKLINGIRDKQSGKTILDFLKSDGFANRNFMQLIHDDSLTFKEDIQKAQVSGQGDSLHEHIANLAGSPAIKKGILQTVKVVDELVKVMGRHKPENIVIEMARENQTTQKGQKNSRERMKRIEEGIKELGSQILKEHPVENTQLQNEKLYLYYLQNGRDMYVDQELDINRLSDYDVDHIVPQSFLKDDSIDNKVLTRSDKNRGKSDNVPSEEVVKKMKNYWRQLLNAKLITQRKFDNLTKAERGGLSELDKAGFIKRQLVETRQITKHVAQILDSRMNTKYDENDKLIREVKVITLKSKLVSDFRKDFQFYKVREINNYHHAHDAYLNAVVGTALIKKYPKLESEFVYGDYKVYDVRKMIAKSEQEIGKATAKYFFYSNIMNFFKTEITLANGEIRKRPLIETNGETGEIVWDKGRDFATVRKVLSMPQVNIVKKTEVQTGGFSKESILPKRNSDKLIARKKDWDPKKYGGFDSPTVAYSVLVVAKVEKGKSKKLKSVKELLGITIMERSSFEKNPIDFLEAKGYKEVKKDLIIKLPKYSLFELENGRKRMLASAGELQKGNELALPSKYVNFLYLASHYEKLKGSPEDNEQKQLFVEQHKHYLDEIIEQISEFSKRVILADANLDKVLSAYNKHRDKPIREQAENIIHLFTLTNLGAPAAFKYFDTTIDKKRYTSTKEVLDATLIHQSITGLYETRIDLSQLGGDGAPESATESGGTSTESEGSAGTSTESEGSAGSAGSTSTEEGTSTESEGSAGTSTESEGSAGTSESATESGGTSTESEGSSSGAAFKPNPINYILGLDIGIASVGWAMVEIDEEENPIRLIDLGVRVFERAEVPKTGDSLAMARRLARSVRRLTRRRAHRLLRARRLLKREGVLQAADFDENGLIKSLPNTPWQLRAAALDRKLTPLEWSAVLLHLIKHRGYLSQRKNEGETADKELGALLKGVANNAHALQTGDFRTPAELALNKFEKESGHIRNQRGDYSHTFSRKDLQAELILLFEKQKEFGNPHVSGGLKEGIETLLMTQRPALSGDAVQKMLGHCTFEPAEPKAAKNTYTAERFIWLTKLNNLRILEQGSERPLTDTERATLMDEPYRKSKLTYAQARKLLGLEDTAFFKGLRYGKDNAEASTLMEMKAYHAISRALEKEGLKDKKSPLNLSSELQDEIGTAFSLFKTDEDITGRLKDRVQPEILEALLKHISFDKFVQISLKALRRIVPLMEQGKRYDEACAEIYGDHYGKKNTEEKIYLPPIPADEIRNPVVLRALSQARKVINGVVRRYGSPARIHIETAREVGKSFKDRKEIEKRQEENRKDREKAAAKFREYFPNFVGEPKSKDILKLRLYEQQHGKCLYSGKEINLVRLNEKGYVEIDHALPFSRTWDDSFNNKVLVLGSENQNKGNQTPYEYFNGKDNSREWQEFKARVETSRFPRSKKQRILLQKFDEDGFKECNLNDTRYVNRFLCQFVADHILLTGKGKRRVFASNGQITNLLRGFWGLRKVRAENDRHHALDAVVVACSTVAMQQKITRFVRYKEMNAFDGKTIDKETGKVLHQKTHFPQPWEFFAQEVMIRVFGKPDGKPEFEEADTPEKLRTLLAEKLSSRPEAVHEYVTPLFVSRAPNRKMSGAHKDTLRSAKRFVKHNEKISVKRVWLTEIKLADLENMVNYKNGREIELYEALKARLEAYGGNAKQAFDPKDNPFYKKGGQLVKAVRVEKTQESGVLLNKKNAYTIADNGDMVRVDVFCKVDKKGKNQYFIVPIYAWQVAENILPDIDCKGYRIDDSYTFCFSLHKYDLIAFQKDEKSKVEFAYYINCDSSNGRFYLAWHDKGSKEQQFRISTQNLVLIQKYQVNELGKEIRPCRLKKRPPVRSGKRTADGSGGGSPKKKRKVSESATPESVSGWRLFKKIS

SEQ ID NO: 86 - RNA, 7266 nt, synthetic construct
  misc_feature 1..7266: note = Synthetic: Cas9-Cas9 fusion -81 amino acid residual linker withSpyCas9 without Rec2 domain (mRNA V) -mRNA sequence
  source 1..7266: mol_type = other RNA
atggacaagaagtactccatcggcctggacatcggcaccaactccgtgggctgggccgtgatcaccgacgagtacaaggtgccctccaagaagttcaaggtgctgggcaacaccgaccggcactccatcaagaagaacctgatcggcgccctgctgttcgactccggcgagaccgccgaggccacccggctgaagcggaccgcccggcggcggtacacccggcggaagaaccggatctgctacctgcaggagatcttctccaacgagatggccaaggtggacgactccttcttccaccggctggaggagtccttcctggtggaggaggacaagaagcacgagcggcaccccatcttcggcaacatcgtggacgaggtggcctaccacgagaagtaccccaccatctaccacctgcggaagaagctggtggactccaccgacaaggccgacctgcggctgatctacctggccctggcccacatgatcaagttccggggccacttcctgatcgagggcgacctgggcggcggcggctccaccgagatcaccaaggcccccctgtccgcctccatgatcaagcggtacgacgagcaccaccaggacctgaccctgctgaaggccctggtgcggcagcagctgcccgagaagtacaaggagatcttcttcgaccagtccaagaacggctacgccggctacatcgacggcggcgcctcccaggaggagttctacaagttcatcaagcccatcctggagaagatggacggcaccgaggagctgctggtgaagctgaaccgggaggacctgctgcggaagcagcggaccttcgacaacggctccatcccccaccagatccacctgggcgagctgcacgccatcctgcggcggcaggaggacttctaccccttcctgaaggacaaccgggagaagatcgagaagatcctgaccttccggatcccctactacgtgggccccctggcccggggcaactcccggttcgcctggatgacccggaagtccgaggagaccatcaccccctggaacttcgaggaggtggtggacaagggcgcctccgcccagtccttcatcgagcggatgaccaacttcgacaagaacctgcccaacgagaaggtgctgcccaagcactccctgctgtacgagtacttcaccgtgtacaacgagctgaccaaggtgaagtacgtgaccgagggcatgcggaagcccgccttcctgtccggcgagcagaagaaggccatcgtggacctgctgttcaagaccaaccggaaggtgaccgtgaagcagctgaaggaggactacttcaagaagatcgagtgcttcgactccgtggagatctccggcgtggaggaccggttcaacgcctccctgggcacctaccacgacctgctgaagatcatcaaggacaaggacttcctggacaacgaggagaacgaggacatcctggaggacatcgtgctgaccctgaccctgttcgaggaccgggagatgatcgaggagcggctgaagacctacgcccacctgttcgacgacaaggtgatgaagcagctgaagcggcggcggtacaccggctggggccggctgtcccggaagctgatcaacggcatccgggacaagcagtccggcaagaccatcctggacttcctgaagtccgacggcttcgccaaccggaacttcatgcagctgatccacgacgactccctgaccttcaaggaggacatccagaaggcccaggtgtccggccagggcgactccctgcacgagcacatcgccaacctggccggctcccccgccatcaagaagggcatcctgcagaccgtgaaggtggtggacgagctggtgaaggtgatgggccggcacaagcccgagaacatcgtgatcgagatggcccgggagaaccagaccacccagaagggccagaagaactcccgggagcggatgaagcggatcgaggagggcatcaaggagctgggctcccagatcctgaaggagcaccccgtggagaacacccagctgcagaacgagaagctgtacctgtactacctgcagaacggccgggacatgtacgtggaccaggagctggacatcaaccggctgtccgactacgacgtggaccacatcgtgccccagtccttcctgaaggacgactccatcgacaacaaggtgctgacccggtccgacaagaaccggggcaagtccgacaacgtgccctccgaggaggtggtgaagaagatgaagaactactggcggcagctgctgaacgccaagctgatcacccagcggaagttcgacaacctgaccaaggccgagcggggcggcctgtccgagctggacaaggccggcttcatcaagcggcagctggtggagacccggcagatcaccaagcacgtggcccagatcctggactcccggatgaacaccaagtacgacgagaacgacaagctgatccgggaggtgaaggtgatcaccctgaagtccaagctggtgtccgacttccggaaggacttccagttctacaaggtgcgggagatcaacaactaccaccacgcccacgacgcctacctgaacgccgtggtgggcaccgccctgatcaagaagtaccccaagctggagtccgagttcgtgtacggcgactacaaggtgtacgacgtgcggaagatgatcgccaagtccgagcaggagatcggcaaggccaccgccaagtacttcttctactccaacatcatgaacttcttcaagaccgagatcaccctggccaacggcgagatccggaagcggcccctgatcgagaccaacggcgagaccggcgagatcgtgtgggacaagggccgggacttcgccaccgtgcggaaggtgctgtccatgccccaggtgaacatcgtgaagaagaccgaggtgcagaccggcggcttctccaaggagtccatcctgcccaagcggaactccgacaagctgatcgcccggaagaaggactgggaccccaagaagtacggcggcttcgactcccccaccgtggcctactccgtgctggtggtggccaaggtggagaagggcaagtccaagaagctgaagtccgtgaaggagctgctgggcatcaccatcatggagcggtcctccttcgagaagaaccccatcgacttcctggaggccaagggctacaaggaggtgaagaaggacctgatcatcaagctgcccaagtactccctgttcgagctggagaacggccggaagcggatgctggcctccgccggcgagctgcagaagggcaacgagctggccctgccctccaagtacgtgaacttcctgtacctggcctcccactacgagaagctgaagggctcccccgaggacaacgagcagaagcagctgttcgtggagcagcacaagcactacctggacgagatcatcgagcagatctccgagttctccaagcgggtgatcctggccgacgccaacctggacaaggtgctgtccgcctacaacaagcaccgggacaagcccatccgggagcaggccgagaacatcatccacctgttcaccctgaccaacctgggcgcccccgccgccttcaagtacttcgacaccaccatcgacaagaagcggtacacctccaccaaggaggtgctggacgccaccctgatccaccagtccatcaccggcctgtacgagacccggatcgacctgtcccagctgggcggcgacggcgcccccgagtccgccaccgagtccggcggcacctccaccgagtccgagggctccgccggcacctccaccgagtccgagggctccgccggctccgccggctccacctccaccgaggagggcacctccaccgagtccgagggctccgccggcacctccaccgagtccgagggctccgccggcacctccgagtccgccaccgagtccggcggcacctccaccgagtccgagggctcctcctccggtgccgccttcaagcccaaccccatcaactacatcctgggcctggacatcggcatcgcctccgtgggctgggccatggtggagatcgacgaggaggagaaccccatccggctgatcgacctgggcgtgcgggtgttcgagcgggccgaggtgcccaagaccggcgactccctggccatggcccggcggctggcccggtccgtgcggcggctgacccggcggcgggcccaccggctgctgcgggcccggcggctgctgaagcgggagggcgtgctgcaggccgccgacttcgacgagaacggcctgatcaagtccctgcccaacaccccctggcagctgcgggccgccgccctggaccggaagctgacccccctggagtggtccgccgtgctgctgcacctgatcaagcaccggggctacctgtcccagcggaagaacgagggcgagaccgccgacaaggagctgggcgccctgctgaagggcgtggccaacaacgcccacgccctgcagaccggcgacttccggacccccgccgagctggccctgaacaagttcgagaaggagtccggccacatccggaaccagcggggcgactactcccacaccttctcccggaaggacctgcaggccgagctgatcctgctgttcgagaagcagaaggagttcggcaacccccacgtgtccggcggcctgaaggagggcatcgagaccctgctgatgacccagcggcccgccctgtccggcgacgccgtgcagaagatgctgggccactgcaccttcgagcccgccgagcccaaggccgccaagaacacctacaccgccgagcggttcatctggctgaccaagctgaacaacctgcggatcctggagcagggctccgagcggcccctgaccgacaccgagcgggccaccctgatggacgagccctaccggaagtccaagctgacctacgcccaggcccggaagctgctgggcctggaggacaccgccttcttcaagggcctgcggtacggcaaggacaacgccgaggcctccaccctgatggagatgaaggcctaccacgccatctcccgggccctggagaaggagggcctgaaggacaagaagtcccccctgaacctgtcctccgagctgcaggacgagatcggcaccgccttctccctgttcaagaccgacgaggacatcaccggccggctgaaggaccgggtgcagcccgagatcctggaggccctgctgaagcacatctccttcgacaagttcgtgcagatctccctgaaggccctgcggcggatcgtgcccctgatggagcagggcaagcggtacgacgaggcctgcgccgagatctacggcgaccactacggcaagaagaacaccgaggagaagatctacctgccccccatccccgccgacgagatccggaaccccgtggtgctgcgggccctgtcccaggcccggaaggtgatcaacggcgtggtgcggcggtacggctcccccgcccggatccacatcgagaccgcccgggaggtgggcaagtccttcaaggaccggaaggagatcgagaagcggcaggaggagaaccggaaggaccgggagaaggccgccgccaagttccgggagtacttccccaacttcgtgggcgagcccaagtccaaggacatcctgaagctgcggctgtacgagcagcagcacggcaagtgcctgtactccggcaaggagatcaacctggtgcggctgaacgagaagggctacgtggagatcgaccacgccctgcccttctcccggacctgggacgactccttcaacaacaaggtgctggtgctgggctccgagaaccagaacaagggcaaccagaccccctacgagtacttcaacggcaaggacaactcccgggagtggcaggagttcaaggcccgggtggagacctcccggttcccccggtccaagaagcagcggatcctgctgcagaagttcgacgaggacggcttcaaggagtgcaacctgaacgacacccggtacgtgaaccgcttcctgtgccagttcgtggccgaccacatcctgctgaccggcaagggcaagcggcgggtgttcgcctccaacggccagatcaccaacctgctgcggggcttctggggcctgcggaaggtgcgggccgagaacgaccggcaccacgccctggacgccgtggtggtggcctgctccaccgtggccatgcagcagaagatcacccggttcgtgcggtacaaggagatgaacgccttcgacggcaagaccatcgacaaggagaccggcaaggtgctgcaccagaagacccacttcccccagccctgggagttcttcgcccaggaggtgatgatccgggtgttcggcaagcccgacggcaagcccgagttcgaggaggccgacacccccgagaagctgcggaccctgctggccgagaagctgtcctcccggcccgaggccgtgcacgagtacgtgacccccctgttcgtgtcccgggcccccaaccggaagatgtccggcgcccacaaggacaccctgcggtccgccaagcggttcgtgaagcacaacgagaagatctccgtgaagcgggtgtggctgaccgagatcaagctggccgacctggagaacatggtgaactacaagaacggccgggagatcgagctgtacgaggccctgaaggcccggctggaggcctacggcggcaacgccaagcaggccttcgaccccaaggacaaccccttctacaagaagggcggccagctggtgaaggccgtgcgggtggagaagacccaggagtccggcgtgctgctgaacaagaagaacgcctacaccatcgccgacaacggcgacatggtgcgggtggacgtgttctgcaaggtggacaagaagggcaagaaccagtacttcatcgtgcccatctacgcctggcaggtggccgagaacatcctgcccgacatcgactgcaagggctaccggatcgacgactcctacaccttctgcttctccctgcacaagtacgacctgatcgccttccagaaggacgagaagtccaaggtggagttcgcctactacatcaactgcgactcctccaacggccggttctacctggcctggcacgacaagggctccaaggagcagcagttccggatctccacccagaacctggtgctgatccagaagtaccaggtgaacgagctgggcaaggagatccggccctgccggctgaagaagcggccccccgtgcggtccggaaagcggaccgccgacggctccggaggaggaagcccgaagaagaagagaaaggtctag

SEQ ID NO: 87 - protein, 2421 aa, synthetic construct
  REGION 1..2421: note = Synthetic: Cas9-Cas9 fusion -81 amino acid residual linker withSpyCas9 without Rec2 domain (mRNA V) -amino acid sequence
MDKKYSIGLDIGTNSVGWAVITDEYKVPSKKFKVLGNTDRHSIKKNLIGALLFDSGETAEATRLKRTARRRYTRRKNRICYLQEIFSNEMAKVDDSFFHRLEESFLVEEDKKHERHPIFGNIVDEVAYHEKYPTIYHLRKKLVDSTDKADLRLIYLALAHMIKFRGHFLIEGDLGGGGSTEITKAPLSASMIKRYDEHHQDLTLLKALVRQQLPEKYKEIFFDQSKNGYAGYIDGGASQEEFYKFIKPILEKMDGTEELLVKLNREDLLRKQRTFDNGSIPHQIHLGELHAILRRQEDFYPFLKDNREKIEKILTFRIPYYVGPLARGNSRFAWMTRKSEETITPWNFEEVVDKGASAQSFIERMTNFDKNLPNEKVLPKHSLLYEYFTVYNELTKVKYVTEGMRKPAFLSGEQKKAIVDLLFKTNRKVTVKQLKEDYFKKIECFDSVEISGVEDRFNASLGTYHDLLKIIKDKDFLDNEENEDILEDIVLTLTLFEDREMIEERLKTYAHLFDDKVMKQLKRRRYTGWGRLSRKLINGIRDKQSGKTILDFLKSDGFANRNFMQLIHDDSLTFKEDIQKAQVSGQGDSLHEHIANLAGSPAIKKGILQTVKVVDELVKVMGRHKPENIVIEMARENQTTQKGQKNSRERMKRIEEGIKELGSQILKEHPVENTQLQNEKLYLYYLQNGRDMYVDQELDINRLSDYDVDHIVPQSFLKDDSIDNKVLTRSDKNRGKSDNVPSEEVVKKMKNYWRQLLNAKLITQRKFDNLTKAERGGLSELDKAGFIKRQLVETRQITKHVAQILDSRMNTKYDENDKLIREVKVITLKSKLVSDFRKDFQFYKVREINNYHHAHDAYLNAVVGTALIKKYPKLESEFVYGDYKVYDVRKMIAKSEQEIGKATAKYFFYSNIMNFFKTEITLANGEIRKRPLIETNGETGEIVWDKGRDFATVRKVLSMPQVNIVKKTEVQTGGFSKESILPKRNSDKLIARKKDWDPKKYGGFDSPTVAYSVLVVAKVEKGKSKKLKSVKELLGITIMERSSFEKNPIDFLEAKGYKEVKKDLIIKLPKYSLFELENGRKRMLASAGELQKGNELALPSKYVNFLYLASHYEKLKGSPEDNEQKQLFVEQHKHYLDEIIEQISEFSKRVILADANLDKVLSAYNKHRDKPIREQAENIIHLFTLTNLGAPAAFKYFDTTIDKKRYTSTKEVLDATLIHQSITGLYETRIDLSQLGGDGAPESATESGGTSTESEGSAGTSTESEGSAGSAGSTSTEEGTSTESEGSAGTSTESEGSAGTSESATESGGTSTESEGSSSGAAFKPNPINYILGLDIGIASVGWAMVEIDEEENPIRLIDLGVRVFERAEVPKTGDSLAMARRLARSVRRLTRRRAHRLLRARRLLKREGVLQAADFDENGLIKSLPNTPWQLRAAALDRKLTPLEWSAVLLHLIKHRGYLSQRKNEGETADKELGALLKGVANNAHALQTGDFRTPAELALNKFEKESGHIRNQRGDYSHTFSRKDLQAELILLFEKQKEFGNPHVSGGLKEGIETLLMTQRPALSGDAVQKMLGHCTFEPAEPKAAKNTYTAERFIWLTKLNNLRILEQGSERPLTDTERATLMDEPYRKSKLTYAQARKLLGLEDTAFFKGLRYGKDNAEASTLMEMKAYHAISRALEKEGLKDKKSPLNLSSELQDEIGTAFSLFKTDEDITGRLKDRVQPEILEALLKHISFDKFVQISLKALRRIVPLMEQGKRYDEACAEIYGDHYGKKNTEEKIYLPPIPADEIRNPVVLRALSQARKVINGVVRRYGSPARIHIETAREVGKSFKDRKEIEKRQEENRKDREKAAAKFREYFPNFVGEPKSKDILKLRLYEQQHGKCLYSGKEINLVRLNEKGYVEIDHALPFSRTWDDSFNNKVLVLGSENQNKGNQTPYEYFNGKDNSREWQEFKARVETSRFPRSKKQRILLQKFDEDGFKECNLNDTRYVNRFLCQFVADHILLTGKGKRRVFASNGQITNLLRGFWGLRKVRAENDRHHALDAVVVACSTVAMQQKITRFVRYKEMNAFDGKTIDKETGKVLHQKTHFPQPWEFFAQEVMIRVFGKPDGKPEFEEADTPEKLRTLLAEKLSSRPEAVHEYVTPLFVSRAPNRKMSGAHKDTLRSAKRFVKHNEKISVKRVWLTEIKLADLENMVNYKNGREIELYEALKARLEAYGGNAKQAFDPKDNPFYKKGGQLVKAVRVEKTQESGVLLNKKNAYTIADNGDMVRVDVFCKVDKKGKNQYFIVPIYAWQVAENILPDIDCKGYRIDDSYTFCFSLHKYDLIAFQKDEKSKVEFAYYINCDSSNGRFYLAWHDKGSKEQQFRISTQNLVLIQKYQVNELGKEIRPCRLKKRPPVRSGKRTADGSGGGSPKKKRKV

SEQ ID NO: 88 - RNA, 7631 nt, synthetic construct
  misc_feature 1..7631: note = Synthetic: Cas9-Cas9 fusion -81 amino acid residue linker and HiBit tag-SpyCas9 without Rec3 domain (mRNA W) -mRNA sequence
  source 1..7631: mol_type = other RNA
gggaagctcagaataaacgctcaactttggccggatctgccaccatggacaagaagtactccatcggcctggacatcggcaccaactccgtgggctgggccgtgatcaccgacgagtacaaggtgccctccaagaagttcaaggtgctgggcaacaccgaccggcactccatcaagaagaacctgatcggcgccctgctgttcgactccggcgagaccgccgaggccacccggctgaagcggaccgcccggcggcggtacacccggcggaagaaccggatctgctacctgcaggagatcttctccaacgagatggccaaggtggacgactccttcttccaccggctggaggagtccttcctggtggaggaggacaagaagcacgagcggcaccccatcttcggcaacatcgtggacgaggtggcctaccacgagaagtaccccaccatctaccacctgcggaagaagctggtggactccaccgacaaggccgacctgcggctgatctacctggccctggcccacatgatcaagttccggggccacttcctgatcgagggcgacctgaaccccgacaactccgacgtggacaagctgttcatccagctggtgcagacctacaaccagctgttcgaggagaaccccatcaacgcctccggcgtggacgccaaggccatcctgtccgcccggctgtccaagtcccggcggctggagaacctgatcgcccagctgcccggcgagaagaagaacggcctgttcggcaacctgatcgccctgtccctgggcctgacccccaacttcaagtccaacttcgacctggccgaggacgccaagctgcagctgtccaaggacacctacgacgacgacctggacaacctgctggcccagatcggcgaccagtacgccgacctgttcctggccgccaagaacctgtccgacgccatcctgctgtccgacatcctgcgggtgaacaccgagatcaccaaggcccccctgtccgcctccatgatcaagcggtacgacgagcaccaccaggacctgaccctgctgaaggccctggtgcggcagcagctgcccgagaagtacaaggagatcttcttcgaccagtccaagaacggctacgccggctacatcgacggcggcgcctcccaggaggagttctacaagttcatcaagcccatcctggagaagatggacggcaccgaggagctgctggtgaagctgaaccgggaggacctgctgcggaagcagcggaccttcgacaacggctccatcccccaccagatccacctgggcgagctgcacgccatcctgcggcggcaggaggacttctaccccttcctgaaggacaaccgggagaagatcgagaagatcctgaccttccggatcccctactacgtgggccccctggcccggggcaactcccggttcgcctggatgacccggaagtccgaggagaccatcaccccctggaacttcgaggaggtggtggacaagggcgcctccgcccagtccttcatcgagcggatgaccggcggctcctccggccagggcgactccctgcacgagcacatcgccaacctggccggctcccccgccatcaagaagggcatcctgcagaccgtgaaggtggtggacgagctggtgaaggtgatgggccggcacaagcccgagaacatcgtgatcgagatggcccgggagaaccagaccacccagaagggccagaagaactcccgggagcggatgaagcggatcgaggagggcatcaaggagctgggctcccagatcctgaaggagcaccccgtggagaacacccagctgcagaacgagaagctgtacctgtactacctgcagaacggccgggacatgtacgtggaccaggagctggacatcaaccggctgtccgactacgacgtggaccacatcgtgccccagtccttcctgaaggacgactccatcgacaacaaggtgctgacccggtccgacaagaaccggggcaagtccgacaacgtgccctccgaggaggtggtgaagaagatgaagaactactggcggcagctgctgaacgccaagctgatcacccagcggaagttcgacaacctgaccaaggccgagcggggcggcctgtccgagctggacaaggccggcttcatcaagcggcagctggtggagacccggcagatcaccaagcacgtggcccagatcctggactcccggatgaacaccaagtacgacgagaacgacaagctgatccgggaggtgaaggtgatcaccctgaagtccaagctggtgtccgacttccggaaggacttccagttctacaaggtgcgggagatcaacaactaccaccacgcccacgacgcctacctgaacgccgtggtgggcaccgccctgatcaagaagtaccccaagctggagtccgagttcgtgtacggcgactacaaggtgtacgacgtgcggaagatgatcgccaagtccgagcaggagatcggcaaggccaccgccaagtacttcttctactccaacatcatgaacttcttcaagaccgagatcaccctggccaacggcgagatccggaagcggcccctgatcgagaccaacggcgagaccggcgagatcgtgtgggacaagggccgggacttcgccaccgtgcggaaggtgctgtccatgccccaggtgaacatcgtgaagaagaccgaggtgcagaccggcggcttctccaaggagtccatcctgcccaagcggaactccgacaagctgatcgcccggaagaaggactgggaccccaagaagtacggcggcttcgactcccccaccgtggcctactccgtgctggtggtggccaaggtggagaagggcaagtccaagaagctgaagtccgtgaaggagctgctgggcatcaccatcatggagcggtcctccttcgagaagaaccccatcgacttcctggaggccaagggctacaaggaggtgaagaaggacctgatcatcaagctgcccaagtactccctgttcgagctggagaacggccggaagcggatgctggcctccgccggcgagctgcagaagggcaacgagctggccctgccctccaagtacgtgaacttcctgtacctggcctcccactacgagaagctgaagggctcccccgaggacaacgagcagaagcagctgttcgtggagcagcacaagcactacctggacgagatcatcgagcagatctccgagttctccaagcgggtgatcctggccgacgccaacctggacaaggtgctgtccgcctacaacaagcaccgggacaagcccatccgggagcaggccgagaacatcatccacctgttcaccctgaccaacctgggcgcccccgccgccttcaagtacttcgacaccaccatcgacaagaagcggtacacctccaccaaggaggtgctggacgccaccctgatccaccagtccatcaccggcctgtacgagacccggatcgacctgtcccagctgggcggcgacggcgcccccgagtccgccaccgagtccggcggcacctccaccgagtccgagggctccgccggcacctccaccgagtccgagggctccgccggctccgccggctccacctccaccgaggagggcacctccaccgagtccgagggctccgccggcacctccaccgagtccgagggctccgccggcacctccgagtccgccaccgagtccggcggcacctccaccgagtccgagggctcctcctccggtgccgccttcaagcccaaccccatcaactacatcctgggcctggacatcggcatcgcctccgtgggctgggccatggtggagatcgacgaggaggagaaccccatccggctgatcgacctgggcgtgcgggtgttcgagcgggccgaggtgcccaagaccggcgactccctggccatggcccggcggctggcccggtccgtgcggcggctgacccggcggcgggcccaccggctgctgcgggcccggcggctgctgaagcgggagggcgtgctgcaggccgccgacttcgacgagaacggcctgatcaagtccctgcccaacaccccctggcagctgcgggccgccgccctggaccggaagctgacccccctggagtggtccgccgtgctgctgcacctgatcaagcaccggggctacctgtcccagcggaagaacgagggcgagaccgccgacaaggagctgggcgccctgctgaagggcgtggccaacaacgcccacgccctgcagaccggcgacttccggacccccgccgagctggccctgaacaagttcgagaaggagtccggccacatccggaaccagcggggcgactactcccacaccttctcccggaaggacctgcaggccgagctgatcctgctgttcgagaagcagaaggagttcggcaacccccacgtgtccggcggcctgaaggagggcatcgagaccctgctgatgacccagcggcccgccctgtccggcgacgccgtgcagaagatgctgggccactgcaccttcgagcccgccgagcccaaggccgccaagaacacctacaccgccgagcggttcatctggctgaccaagctgaacaacctgcggatcctggagcagggctccgagcggcccctgaccgacaccgagcgggccaccctgatggacgagccctaccggaagtccaagctgacctacgcccaggcccggaagctgctgggcctggaggacaccgccttcttcaagggcctgcggtacggcaaggacaacgccgaggcctccaccctgatggagatgaaggcctaccacgccatctcccgggccctggagaaggagggcctgaaggacaagaagtcccccctgaacctgtcctccgagctgcaggacgagatcggcaccgccttctccctgttcaagaccgacgaggacatcaccggccggctgaaggaccgggtgcagcccgagatcctggaggccctgctgaagcacatctccttcgacaagttcgtgcagatctccctgaaggccctgcggcggatcgtgcccctgatggagcagggcaagcggtacgacgaggcctgcgccgagatctacggcgaccactacggcaagaagaacaccgaggagaagatctacctgccccccatccccgccgacgagatccggaaccccgtggtgctgcgggccctgtcccaggcccggaaggtgatcaacggcgtggtgcggcggtacggctcccccgcccggatccacatcgagaccgcccgggaggtgggcaagtccttcaaggaccggaaggagatcgagaagcggcaggaggagaaccggaaggaccgggagaaggccgccgccaagttccgggagtacttccccaacttcgtgggcgagcccaagtccaaggacatcctgaagctgcggctgtacgagcagcagcacggcaagtgcctgtactccggcaaggagatcaacctggtgcggctgaacgagaagggctacgtggagatcgaccacgccctgcccttctcccggacctgggacgactccttcaacaacaaggtgctggtgctgggctccgagaaccagaacaagggcaaccagaccccctacgagtacttcaacggcaaggacaactcccgggagtggcaggagttcaaggcccgggtggagacctcccggttcccccggtccaagaagcagcggatcctgctgcagaagttcgacgaggacggcttcaaggagtgcaacctgaacgacacccggtacgtgaaccgcttcctgtgccagttcgtggccgaccacatcctgctgaccggcaagggcaagcggcgggtgttcgcctccaacggccagatcaccaacctgctgcggggcttctggggcctgcggaaggtgcgggccgagaacgaccggcaccacgccctggacgccgtggtggtggcctgctccaccgtggccatgcagcagaagatcacccggttcgtgcggtacaaggagatgaacgccttcgacggcaagaccatcgacaaggagaccggcaaggtgctgcaccagaagacccacttcccccagccctgggagttcttcgcccaggaggtgatgatccgggtgttcggcaagcccgacggcaagcccgagttcgaggaggccgacacccccgagaagctgcggaccctgctggccgagaagctgtcctcccggcccgaggccgtgcacgagtacgtgacccccctgttcgtgtcccgggcccccaaccggaagatgtccggcgcccacaaggacaccctgcggtccgccaagcggttcgtgaagcacaacgagaagatctccgtgaagcgggtgtggctgaccgagatcaagctggccgacctggagaacatggtgaactacaagaacggccgggagatcgagctgtacgaggccctgaaggcccggctggaggcctacggcggcaacgccaagcaggccttcgaccccaaggacaaccccttctacaagaagggcggccagctggtgaaggccgtgcgggtggagaagacccaggagtccggcgtgctgctgaacaagaagaacgcctacaccatcgccgacaacggcgacatggtgcgggtggacgtgttctgcaaggtggacaagaagggcaagaaccagtacttcatcgtgcccatctacgcctggcaggtggccgagaacatcctgcccgacatcgactgcaagggctaccggatcgacgactcctacaccttctgcttctccctgcacaagtacgacctgatcgccttccagaaggacgagaagtccaaggtggagttcgcctactacatcaactgcgactcctccaacggccggttctacctggcctggcacgacaagggctccaaggagcagcagttccggatctccacccagaacctggtgctgatccagaagtaccaggtgaacgagctgggcaaggagatccggccctgccggctgaagaagcggccccccgtgcggtccggaaagcggaccgccgacggctccggaggaggaagcccgaagaagaagagaaaggtcagcgaaagcgcaacaccggaaagcgtcagcggatggagactgttcaagaagatcagctagctagcaccagcctcaagaacacccgaatggagtctctaagctacataataccaacttacactttacaaaatgttgtcccccaaaatgtagccattcgtatctgctcctaataaaaagaaagtttcttcacattctctcgagaaaaaaaaaaaatggaaaaaaaaaaaacggaaaaaaaaaaaaggtaaaaaaaaaaaatataaaaaaaaaaaacataaaaaaaaaaaacgaaaaaaaaaaaacgtaaaaaaaaaaaactcaaaaaaaaaaaagataaaaaaaaaaaacctaaaaaaaaaaaatgtaaaaaaaaaaaagggaaaaaaaaaaaacgcaaaaaaaaaaaacacaaaaaaaaaaaatgcaaaaaaaaaaaatcgaaaaaaaaaaaatctaaaaaaaaaaaacgaaaaaaaaaaaacccaaaaaaaaaaaagacaaaaaaaaaaaatagaaaaaaaaaaaagttaaaaaaaaaaaactgaaaaaaaaaaaatttaaaaaaaaaaaatctag

SEQ ID NO: 89 - RNA, 7071 nt, synthetic construct
  misc_feature 1..7071: note = Synthetic: Cas9-Cas9 fusion -81 amino acid residue linker and HiBit tag-SpyCas9 without Rec3 domain (mRNA W) -ORF sequence
  source 1..7071: mol_type = other RNA
atggacaagaagtactccatcggcctggacatcggcaccaactccgtgggctgggccgtgatcaccgacgagtacaaggtgccctccaagaagttcaaggtgctgggcaacaccgaccggcactccatcaagaagaacctgatcggcgccctgctgttcgactccggcgagaccgccgaggccacccggctgaagcggaccgcccggcggcggtacacccggcggaagaaccggatctgctacctgcaggagatcttctccaacgagatggccaaggtggacgactccttcttccaccggctggaggagtccttcctggtggaggaggacaagaagcacgagcggcaccccatcttcggcaacatcgtggacgaggtggcctaccacgagaagtaccccaccatctaccacctgcggaagaagctggtggactccaccgacaaggccgacctgcggctgatctacctggccctggcccacatgatcaagttccggggccacttcctgatcgagggcgacctgaaccccgacaactccgacgtggacaagctgttcatccagctggtgcagacctacaaccagctgttcgaggagaaccccatcaacgcctccggcgtggacgccaaggccatcctgtccgcccggctgtccaagtcccggcggctggagaacctgatcgcccagctgcccggcgagaagaagaacggcctgttcggcaacctgatcgccctgtccctgggcctgacccccaacttcaagtccaacttcgacctggccgaggacgccaagctgcagctgtccaaggacacctacgacgacgacctggacaacctgctggcccagatcggcgaccagtacgccgacctgttcctggccgccaagaacctgtccgacgccatcctgctgtccgacatcctgcgggtgaacaccgagatcaccaaggcccccctgtccgcctccatgatcaagcggtacgacgagcaccaccaggacctgaccctgctgaaggccctggtgcggcagcagctgcccgagaagtacaaggagatcttcttcgaccagtccaagaacggctacgccggctacatcgacggcggcgcctcccaggaggagttctacaagttcatcaagcccatcctggagaagatggacggcaccgaggagctgctggtgaagctgaaccgggaggacctgctgcggaagcagcggaccttcgacaacggctccatcccccaccagatccacctgggcgagctgcacgccatcctgcggcggcaggaggacttctaccccttcctgaaggacaaccgggagaagatcgagaagatcctgaccttccggatcccctactacgtgggccccctggcccggggcaactcccggttcgcctggatgacccggaagtccgaggagaccatcaccccctggaacttcgaggaggtggtggacaagggcgcctccgcccagtccttcatcgagcggatgaccggcggctcctccggccagggcgactccctgcacgagcacatcgccaacctggccggctcccccgccatcaagaagggcatcctgcagaccgtgaaggtggtggacgagctggtgaaggtgatgggccggcacaagcccgagaacatcgtgatcgagatggcccgggagaaccagaccacccagaagggccagaagaactcccgggagcggatgaagcggatcgaggagggcatcaaggagctgggctcccagatcctgaaggagcaccccgtggagaacacccagctgcagaacgagaagctgtacctgtactacctgcagaacggccgggacatgtacgtggaccaggagctggacatcaaccggctgtccgactacgacgtggaccacatcgtgccccagtccttcctgaaggacgactccatcgacaacaaggtgctgacccggtccgacaagaaccggggcaagtccgacaacgtgccctccgaggaggtggtgaagaagatgaagaactactggcggcagctgctgaacgccaagctgatcacccagcggaagttcgacaacctgaccaaggccgagcggggcggcctgtccgagctggacaaggccggcttcatcaagcggcagctggtggagacccggcagatcaccaagcacgtggcccagatcctggactcccggatgaacaccaagtacgacgagaacgacaagctgatccgggaggtgaaggtgatcaccctgaagtccaagctggtgtccgacttccggaaggacttccagttctacaaggtgcgggagatcaacaactaccaccacgcccacgacgcctacctgaacgccgtggtgggcaccgccctgatcaagaagtaccccaagctggagtccgagttcgtgtacggcgactacaaggtgtacgacgtgcggaagatgatcgccaagtccgagcaggagatcggcaaggccaccgccaagtacttcttctactccaacatcatgaacttcttcaagaccgagatcaccctggccaacggcgagatccggaagcggcccctgatcgagaccaacggcgagaccggcgagatcgtgtgggacaagggccgggacttcgccaccgtgcggaaggtgctgtccatgccccaggtgaacatcgtgaagaagaccgaggtgcagaccggcggcttctccaaggagtccatcctgcccaagcggaactccgacaagctgatcgcccggaagaaggactgggaccccaagaagtacggcggcttcgactcccccaccgtggcctactccgtgctggtggtggccaaggtggagaagggcaagtccaagaagctgaagtccgtgaaggagctgctgggcatcaccatcatggagcggtcctccttcgagaagaaccccatcgacttcctggaggccaagggctacaaggaggtgaagaaggacctgatcatcaagctgcccaagtactccctgttcgagctggagaacggccggaagcggatgctggcctccgccggcgagctgcagaagggcaacgagctggccctgccctccaagtacgtgaacttcctgtacctggcctcccactacgagaagctgaagggctcccccgaggacaacgagcagaagcagctgttcgtggagcagcacaagcactacctggacgagatcatcgagcagatctccgagttctccaagcgggtgatcctggccgacgccaacctggacaaggtgctgtccgcctacaacaagcaccgggacaagcccatccgggagcaggccgagaacatcatccacctgttcaccctgaccaacctgggcgcccccgccgccttcaagtacttcgacaccaccatcgacaagaagcggtacacctccaccaaggaggtgctggacgccaccctgatccaccagtccatcaccggcctgtacgagacccggatcgacctgtcccagctgggcggcgacggcgcccccgagtccgccaccgagtccggcggcacctccaccgagtccgagggctccgccggcacctccaccgagtccgagggctccgccggctccgccggctccacctccaccgaggagggcacctccaccgagtccgagggctccgccggcacctccaccgagtccgagggctccgccggcacctccgagtccgccaccgagtccggcggcacctccaccgagtccgagggctcctcctccggtgccgccttcaagcccaaccccatcaactacatcctgggcctggacatcggcatcgcctccgtgggctgggccatggtggagatcgacgaggaggagaaccccatccggctgatcgacctgggcgtgcgggtgttcgagcgggccgaggtgcccaagaccggcgactccctggccatggcccggcggctggcccggtccgtgcggcggctgacccggcggcgggcccaccggctgctgcgggcccggcggctgctgaagcgggagggcgtgctgcaggccgccgacttcgacgagaacggcctgatcaagtccctgcccaacaccccctggcagctgcgggccgccgccctggaccggaagctgacccccctggagtggtccgccgtgctgctgcacctgatcaagcaccggggctacctgtcccagcggaagaacgagggcgagaccgccgacaaggagctgggcgccctgctgaagggcgtggccaacaacgcccacgccctgcagaccggcgacttccggacccccgccgagctggccctgaacaagttcgagaaggagtccggccacatccggaaccagcggggcgactactcccacaccttctcccggaaggacctgcaggccgagctgatcctgctgttcgagaagcagaaggagttcggcaacccccacgtgtccggcggcctgaaggagggcatcgagaccctgctgatgacccagcggcccgccctgtccggcgacgccgtgcagaagatgctgggccactgcaccttcgagcccgccgagcccaaggccgccaagaacacctacaccgccgagcggttcatctggctgaccaagctgaacaacctgcggatcctggagcagggctccgagcggcccctgaccgacaccgagcgggccaccctgatggacgagccctaccggaagtccaagctgacctacgcccaggcccggaagctgctgggcctggaggacaccgccttcttcaagggcctgcggtacggcaaggacaacgccgaggcctccaccctgatggagatgaaggcctaccacgccatctcccgggccctggagaaggagggcctgaaggacaagaagtcccccctgaacctgtcctccgagctgcaggacgagatcggcaccgccttctccctgttcaagaccgacgaggacatcaccggccggctgaaggaccgggtgcagcccgagatcctggaggccctgctgaagcacatctccttcgacaagttcgtgcagatctccctgaaggccctgcggcggatcgtgcccctgatggagcagggcaagcggtacgacgaggcctgcgccgagatctacggcgaccactacggcaagaagaacaccgaggagaagatctacctgccccccatccccgccgacgagatccggaaccccgtggtgctgcgggccctgtcccaggcccggaaggtgatcaacggcgtggtgcggcggtacggctcccccgcccggatccacatcgagaccgcccgggaggtgggcaagtccttcaaggaccggaaggagatcgagaagcggcaggaggagaaccggaaggaccgggagaaggccgccgccaagttccgggagtacttccccaacttcgtgggcgagcccaagtccaaggacatcctgaagctgcggctgtacgagcagcagcacggcaagtgcctgtactccggcaaggagatcaacctggtgcggctgaacgagaagggctacgtggagatcgaccacgccctgcccttctcccggacctgggacgactccttcaacaacaaggtgctggtgctgggctccgagaaccagaacaagggcaaccagaccccctacgagtacttcaacggcaaggacaactcccgggagtggcaggagttcaaggcccgggtggagacctcccggttcccccggtccaagaagcagcggatcctgctgcagaagttcgacgaggacggcttcaaggagtgcaacctgaacgacacccggtacgtgaaccgcttcctgtgccagttcgtggccgaccacatcctgctgaccggcaagggcaagcggcgggtgttcgcctccaacggccagatcaccaacctgctgcggggcttctggggcctgcggaaggtgcgggccgagaacgaccggcaccacgccctggacgccgtggtggtggcctgctccaccgtggccatgcagcagaagatcacccggttcgtgcggtacaaggagatgaacgccttcgacggcaagaccatcgacaaggagaccggcaaggtgctgcaccagaagacccacttcccccagccctgggagttcttcgcccaggaggtgatgatccgggtgttcggcaagcccgacggcaagcccgagttcgaggaggccgacacccccgagaagctgcggaccctgctggccgagaagctgtcctcccggcccgaggccgtgcacgagtacgtgacccccctgttcgtgtcccgggcccccaaccggaagatgtccggcgcccacaaggacaccctgcggtccgccaagcggttcgtgaagcacaacgagaagatctccgtgaagcgggtgtggctgaccgagatcaagctggccgacctggagaacatggtgaactacaagaacggccgggagatcgagctgtacgaggccctgaaggcccggctggaggcctacggcggcaacgccaagcaggccttcgaccccaaggacaaccccttctacaagaagggcggccagctggtgaaggccgtgcgggtggagaagacccaggagtccggcgtgctgctgaacaagaagaacgcctacaccatcgccgacaacggcgacatggtgcgggtggacgtgttctgcaaggtggacaagaagggcaagaaccagtacttcatcgtgcccatctacgcctggcaggtggccgagaacatcctgcccgacatcgactgcaagggctaccggatcgacgactcctacaccttctgcttctccctgcacaagtacgacctgatcgccttccagaaggacgagaagtccaaggtggagttcgcctactacatcaactgcgactcctccaacggccggttctacctggcctggcacgacaagggctccaaggagcagcagttccggatctccacccagaacctggtgctgatccagaagtaccaggtgaacgagctgggcaaggagatccggccctgccggctgaagaagcggccccccgtgcggtccggaaagcggaccgccgacggctccggaggaggaagcccgaagaagaagagaaaggtcagcgaaagcgcaacaccggaaagcgtcagcggatggagactgttcaagaagatcagctag

SEQ ID NO: 90 - protein, 2356 aa, synthetic construct
  REGION 1..2356: note = Synthetic: Cas9-Cas9 fusion -81 amino acid residue linker and HiBit tag-SpyCas9 without Rec3 domain (mRNA W) -amino acid sequence
MDKKYSIGLDIGTNSVGWAVITDEYKVPSKKFKVLGNTDRHSIKKNLIGALLFDSGETAEATRLKRTARRRYTRRKNRICYLQEIFSNEMAKVDDSFFHRLEESFLVEEDKKHERHPIFGNIVDEVAYHEKYPTIYHLRKKLVDSTDKADLRLIYLALAHMIKFRGHFLIEGDLNPDNSDVDKLFIQLVQTYNQLFEENPINASGVDAKAILSARLSKSRRLENLIAQLPGEKKNGLFGNLIALSLGLTPNFKSNFDLAEDAKLQLSKDTYDDDLDNLLAQIGDQYADLFLAAKNLSDAILLSDILRVNTEITKAPLSASMIKRYDEHHQDLTLLKALVRQQLPEKYKEIFFDQSKNGYAGYIDGGASQEEFYKFIKPILEKMDGTEELLVKLNREDLLRKQRTFDNGSIPHQIHLGELHAILRRQEDFYPFLKDNREKIEKILTFRIPYYVGPLARGNSRFAWMTRKSEETITPWNFEEVVDKGASAQSFIERMTGGSSGQGDSLHEHIANLAGSPAIKKGILQTVKVVDELVKVMGRHKPENIVIEMARENQTTQKGQKNSRERMKRIEEGIKELGSQILKEHPVENTQLQNEKLYLYYLQNGRDMYVDQELDINRLSDYDVDHIVPQSFLKDDSIDNKVLTRSDKNRGKSDNVPSEEVVKKMKNYWRQLLNAKLITQRKFDNLTKAERGGLSELDKAGFIKRQLVETRQITKHVAQILDSRMNTKYDENDKLIREVKVITLKSKLVSDFRKDFQFYKVREINNYHHAHDAYLNAVVGTALIKKYPKLESEFVYGDYKVYDVRKMIAKSEQEIGKATAKYFFYSNIMNFFKTEITLANGEIRKRPLIETNGETGEIVWDKGRDFATVRKVLSMPQVNIVKKTEVQTGGFSKESILPKRNSDKLIARKKDWDPKKYGGFDSPTVAYSVLVVAKVEKGKSKKLKSVKELLGITIMERSSFEKNPIDFLEAKGYKEVKKDLIIKLPKYSLFELENGRKRMLASAGELQKGNELALPSKYVNFLYLASHYEKLKGSPEDNEQKQLFVEQHKHYLDEIIEQISEFSKRVILADANLDKVLSAYNKHRDKPIREQAENIIHLFTLTNLGAPAAFKYFDTTIDKKRYTSTKEVLDATLIHQSITGLYETRIDLSQLGGDGAPESATESGGTSTESEGSAGTSTESEGSAGSAGSTSTEEGTSTESEGSAGTSTESEGSAGTSESATESGGTSTESEGSSSGAAFKPNPINYILGLDIGIASVGWAMVEIDEEENPIRLIDLGVRVFERAEVPKTGDSLAMARRLARSVRRLTRRRAHRLLRARRLLKREGVLQAADFDENGLIKSLPNTPWQLRAAALDRKLTPLEWSAVLLHLIKHRGYLSQRKNEGETADKELGALLKGVANNAHALQTGDFRTPAELALNKFEKESGHIRNQRGDYSHTFSRKDLQAELILLFEKQKEFGNPHVSGGLKEGIETLLMTQRPALSGDAVQKMLGHCTFEPAEPKAAKNTYTAERFIWLTKLNNLRILEQGSERPLTDTERATLMDEPYRKSKLTYAQARKLLGLEDTAFFKGLRYGKDNAEASTLMEMKAYHAISRALEKEGLKDKKSPLNLSSELQDEIGTAFSLFKTDEDITGRLKDRVQPEILEALLKHISFDKFVQISLKALRRIVPLMEQGKRYDEACAEIYGDHYGKKNTEEKIYLPPIPADEIRNPVVLRALSQARKVINGVVRRYGSPARIHIETAREVGKSFKDRKEIEKRQEENRKDREKAAAKFREYFPNFVGEPKSKDILKLRLYEQQHGKCLYSGKEINLVRLNEKGYVEIDHALPFSRTWDDSFNNKVLVLGSENQNKGNQTPYEYFNGKDNSREWQEFKARVETSRFPRSKKQRILLQKFDEDGFKECNLNDTRYVNRFLCQFVADHILLTGKGKRRVFASNGQITNLLRGFWGLRKVRAENDRHHALDAVVVACSTVAMQQKITRFVRYKEMNAFDGKTIDKETGKVLHQKTHFPQPWEFFAQEVMIRVFGKPDGKPEFEEADTPEKLRTLLAEKLSSRPEAVHEYVTPLFVSRAPNRKMSGAHKDTLRSAKRFVKHNEKISVKRVWLTEIKLADLENMVNYKNGREIELYEALKARLEAYGGNAKQAFDPKDNPFYKKGGQLVKAVRVEKTQESGVLLNKKNAYTIADNGDMVRVDVFCKVDKKGKNQYFIVPIYAWQVAENILPDIDCKGYRIDDSYTFCFSLHKYDLIAFQKDEKSKVEFAYYINCDSSNGRFYLAWHDKGSKEQQFRISTQNLVLIQKYQVNELGKEIRPCRLKKRPPVRSGKRTADGSGGGSPKKKRKVSESATPESVSGWRLFKKIS

SEQ ID NO: 91 - RNA, 7014 nt, synthetic construct
  misc_feature 1..7014: note = Synthetic: Cas9-Cas9 fusion -81 amino acid residual linker withSpyCas9 without Rec3 domain (mRNA W) -mRNA sequence
  source 1..7014: mol_type = other RNA
atggacaagaagtactccatcggcctggacatcggcaccaactccgtgggctgggccgtgatcaccgacgagtacaaggtgccctccaagaagttcaaggtgctgggcaacaccgaccggcactccatcaagaagaacctgatcggcgccctgctgttcgactccggcgagaccgccgaggccacccggctgaagcggaccgcccggcggcggtacacccggcggaagaaccggatctgctacctgcaggagatcttctccaacgagatggccaaggtggacgactccttcttccaccggctggaggagtccttcctggtggaggaggacaagaagcacgagcggcaccccatcttcggcaacatcgtggacgaggtggcctaccacgagaagtaccccaccatctaccacctgcggaagaagctggtggactccaccgacaaggccgacctgcggctgatctacctggccctggcccacatgatcaagttccggggccacttcctgatcgagggcgacctgaaccccgacaactccgacgtggacaagctgttcatccagctggtgcagacctacaaccagctgttcgaggagaaccccatcaacgcctccggcgtggacgccaaggccatcctgtccgcccggctgtccaagtcccggcggctggagaacctgatcgcccagctgcccggcgagaagaagaacggcctgttcggcaacctgatcgccctgtccctgggcctgacccccaacttcaagtccaacttcgacctggccgaggacgccaagctgcagctgtccaaggacacctacgacgacgacctggacaacctgctggcccagatcggcgaccagtacgccgacctgttcctggccgccaagaacctgtccgacgccatcctgctgtccgacatcctgcgggtgaacaccgagatcaccaaggcccccctgtccgcctccatgatcaagcggtacgacgagcaccaccaggacctgaccctgctgaaggccctggtgcggcagcagctgcccgagaagtacaaggagatcttcttcgaccagtccaagaacggctacgccggctacatcgacggcggcgcctcccaggaggagttctacaagttcatcaagcccatcctggagaagatggacggcaccgaggagctgctggtgaagctgaaccgggaggacctgctgcggaagcagcggaccttcgacaacggctccatcccccaccagatccacctgggcgagctgcacgccatcctgcggcggcaggaggacttctaccccttcctgaaggacaaccgggagaagatcgagaagatcctgaccttccggatcccctactacgtgggccccctggcccggggcaactcccggttcgcctggatgacccggaagtccgaggagaccatcaccccctggaacttcgaggaggtggtggacaagggcgcctccgcccagtccttcatcgagcggatgaccggcggctcctccggccagggcgactccctgcacgagcacatcgccaacctggccggctcccccgccatcaagaagggcatcctgcagaccgtgaaggtggtggacgagctggtgaaggtgatgggccggcacaagcccgagaacatcgtgatcgagatggcccgggagaaccagaccacccagaagggccagaagaactcccgggagcggatgaagcggatcgaggagggcatcaaggagctgggctcccagatcctgaaggagcaccccgtggagaacacccagctgcagaacgagaagctgtacctgtactacctgcagaacggccgggacatgtacgtggaccaggagctggacatcaaccggctgtccgactacgacgtggaccacatcgtgccccagtccttcctgaaggacgactccatcgacaacaaggtgctgacccggtccgacaagaaccggggcaagtccgacaacgtgccctccgaggaggtggtgaagaagatgaagaactactggcggcagctgctgaacgccaagctgatcacccagcggaagttcgacaacctgaccaaggccgagcggggcggcctgtccgagctggacaaggccggcttcatcaagcggcagctggtggagacccggcagatcaccaagcacgtggcccagatcctggactcccggatgaacaccaagtacgacgagaacgacaagctgatccgggaggtgaaggtgatcaccctgaagtccaagctggtgtccgacttccggaaggacttccagttctacaaggtgcgggagatcaacaactaccaccacgcccacgacgcctacctgaacgccgtggtgggcaccgccctgatcaagaagtaccccaagctggagtccgagttcgtgtacggcgactacaaggtgtacgacgtgcggaagatgatcgccaagtccgagcaggagatcggcaaggccaccgccaagtacttcttctactccaacatcatgaacttcttcaagaccgagatcaccctggccaacggcgagatccggaagcggcccctgatcgagaccaacggcgagaccggcgagatcgtgtgggacaagggccgggacttcgccaccgtgcggaaggtgctgtccatgccccaggtgaacatcgtgaagaagaccgaggtgcagaccggcggcttctccaaggagtccatcctgcccaagcggaactccgacaagctgatcgcccggaagaaggactgggaccccaagaagtacggcggcttcgactcccccaccgtggcctactccgtgctggtggtggccaaggtggagaagggcaagtccaagaagctgaagtccgtgaaggagctgctgggcatcaccatcatggagcggtcctccttcgagaagaaccccatcgacttcctggaggccaagggctacaaggaggtgaagaaggacctgatcatcaagctgcccaagtactccctgttcgagctggagaacggccggaagcggatgctggcctccgccggcgagctgcagaagggcaacgagctggccctgccctccaagtacgtgaacttcctgtacctggcctcccactacgagaagctgaagggctcccccgaggacaacgagcagaagcagctgttcgtggagcagcacaagcactacctggacgagatcatcgagcagatctccgagttctccaagcgggtgatcctggccgacgccaacctggacaaggtgctgtccgcctacaacaagcaccgggacaagcccatccgggagcaggccgagaacatcatccacctgttcaccctgaccaacctgggcgcccccgccgccttcaagtacttcgacaccaccatcgacaagaagcggtacacctccaccaaggaggtgctggacgccaccctgatccaccagtccatcaccggcctgtacgagacccggatcgacctgtcccagctgggcggcgacggcgcccccgagtccgccaccgagtccggcggcacctccaccgagtccgagggctccgccggcacctccaccgagtccgagggctccgccggctccgccggctccacctccaccgaggagggcacctccaccgagtccgagggctccgccggcacctccaccgagtccgagggctccgccggcacctccgagtccgccaccgagtccggcggcacctccaccgagtccgagggctcctcctccggtgccgccttcaagcccaaccccatcaactacatcctgggcctggacatcggcatcgcctccgtgggctgggccatggtggagatcgacgaggaggagaaccccatccggctgatcgacctgggcgtgcgggtgttcgagcgggccgaggtgcccaagaccggcgactccctggccatggcccggcggctggcccggtccgtgcggcggctgacccggcggcgggcccaccggctgctgcgggcccggcggctgctgaagcgggagggcgtgctgcaggccgccgacttcgacgagaacggcctgatcaagtccctgcccaacaccccctggcagctgcgggccgccgccctggaccggaagctgacccccctggagtggtccgccgtgctgctgcacctgatcaagcaccggggctacctgtcccagcggaagaacgagggcgagaccgccgacaaggagctgggcgccctgctgaagggcgtggccaacaacgcccacgccctgcagaccggcgacttccggacccccgccgagctggccctgaacaagttcgagaaggagtccggccacatccggaaccagcggggcgactactcccacaccttctcccggaaggacctgcaggccgagctgatcctgctgttcgagaagcagaaggagttcggcaacccccacgtgtccggcggcctgaaggagggcatcgagaccctgctgatgacccagcggcccgccctgtccggcgacgccgtgcagaagatgctgggccactgcaccttcgagcccgccgagcccaaggccgccaagaacacctacaccgccgagcggttcatctggctgaccaagctgaacaacctgcggatcctggagcagggctccgagcggcccctgaccgacaccgagcgggccaccctgatggacgagccctaccggaagtccaagctgacctacgcccaggcccggaagctgctgggcctggaggacaccgccttcttcaagggcctgcggtacggcaaggacaacgccgaggcctccaccctgatggagatgaaggcctaccacgccatctcccgggccctggagaaggagggcctgaaggacaagaagtcccccctgaacctgtcctccgagctgcaggacgagatcggcaccgccttctccctgttcaagaccgacgaggacatcaccggccggctgaaggaccgggtgcagcccgagatcctggaggccctgctgaagcacatctccttcgacaagttcgtgcagatctccctgaaggccctgcggcggatcgtgcccctgatggagcagggcaagcggtacgacgaggcctgcgccgagatctacggcgaccactacggcaagaagaacaccgaggagaagatctacctgccccccatccccgccgacgagatccggaaccccgtggtgctgcgggccctgtcccaggcccggaaggtgatcaacggcgtggtgcggcggtacggctcccccgcccggatccacatcgagaccgcccgggaggtgggcaagtccttcaaggaccggaaggagatcgagaagcggcaggaggagaaccggaaggaccgggagaaggccgccgccaagttccgggagtacttccccaacttcgtgggcgagcccaagtccaaggacatcctgaagctgcggctgtacgagcagcagcacggcaagtgcctgtactccggcaaggagatcaacctggtgcggctgaacgagaagggctacgtggagatcgaccacgccctgcccttctcccggacctgggacgactccttcaacaacaaggtgctggtgctgggctccgagaaccagaacaagggcaaccagaccccctacgagtacttcaacggcaaggacaactcccgggagtggcaggagttcaaggcccgggtggagacctcccggttcccccggtccaagaagcagcggatcctgctgcagaagttcgacgaggacggcttcaaggagtgcaacctgaacgacacccggtacgtgaaccgcttcctgtgccagttcgtggccgaccacatcctgctgaccggcaagggcaagcggcgggtgttcgcctccaacggccagatcaccaacctgctgcggggcttctggggcctgcggaaggtgcgggccgagaacgaccggcaccacgccctggacgccgtggtggtggcctgctccaccgtggccatgcagcagaagatcacccggttcgtgcggtacaaggagatgaacgccttcgacggcaagaccatcgacaaggagaccggcaaggtgctgcaccagaagacccacttcccccagccctgggagttcttcgcccaggaggtgatgatccgggtgttcggcaagcccgacggcaagcccgagttcgaggaggccgacacccccgagaagctgcggaccctgctggccgagaagctgtcctcccggcccgaggccgtgcacgagtacgtgacccccctgttcgtgtcccgggcccccaaccggaagatgtccggcgcccacaaggacaccctgcggtccgccaagcggttcgtgaagcacaacgagaagatctccgtgaagcgggtgtggctgaccgagatcaagctggccgacctggagaacatggtgaactacaagaacggccgggagatcgagctgtacgaggccctgaaggcccggctggaggcctacggcggcaacgccaagcaggccttcgaccccaaggacaaccccttctacaagaagggcggccagctggtgaaggccgtgcgggtggagaagacccaggagtccggcgtgctgctgaacaagaagaacgcctacaccatcgccgacaacggcgacatggtgcgggtggacgtgttctgcaaggtggacaagaagggcaagaaccagtacttcatcgtgcccatctacgcctggcaggtggccgagaacatcctgcccgacatcgactgcaagggctaccggatcgacgactcctacaccttctgcttctccctgcacaagtacgacctgatcgccttccagaaggacgagaagtccaaggtggagttcgcctactacatcaactgcgactcctccaacggccggttctacctggcctggcacgacaagggctccaaggagcagcagttccggatctccacccagaacctggtgctgatccagaagtaccaggtgaacgagctgggcaaggagatccggccctgccggctgaagaagcggccccccgtgcggtccggaaagcggaccgccgacggctccggaggaggaagcccgaagaagaagagaaaggtctag

SEQ ID NO: 92 - protein, 2337 aa, synthetic construct
  REGION 1..2337: note = Synthetic: Cas9-Cas9 fusion -81 amino acid residual linker withSpyCas9 without Rec3 domain (mRNA W) -amino acid sequence
MDKKYSIGLDIGTNSVGWAVITDEYKVPSKKFKVLGNTDRHSIKKNLIGALLFDSGETAEATRLKRTARRRYTRRKNRICYLQEIFSNEMAKVDDSFFHRLEESFLVEEDKKHERHPIFGNIVDEVAYHEKYPTIYHLRKKLVDSTDKADLRLIYLALAHMIKFRGHFLIEGDLNPDNSDVDKLFIQLVQTYNQLFEENPINASGVDAKAILSARLSKSRRLENLIAQLPGEKKNGLFGNLIALSLGLTPNFKSNFDLAEDAKLQLSKDTYDDDLDNLLAQIGDQYADLFLAAKNLSDAILLSDILRVNTEITKAPLSASMIKRYDEHHQDLTLLKALVRQQLPEKYKEIFFDQSKNGYAGYIDGGASQEEFYKFIKPILEKMDGTEELLVKLNREDLLRKQRTFDNGSIPHQIHLGELHAILRRQEDFYPFLKDNREKIEKILTFRIPYYVGPLARGNSRFAWMTRKSEETITPWNFEEVVDKGASAQSFIERMTGGSSGQGDSLHEHIANLAGSPAIKKGILQTVKVVDELVKVMGRHKPENIVIEMARENQTTQKGQKNSRERMKRIEEGIKELGSQILKEHPVENTQLQNEKLYLYYLQNGRDMYVDQELDINRLSDYDVDHIVPQSFLKDDSIDNKVLTRSDKNRGKSDNVPSEEVVKKMKNYWRQLLNAKLITQRKFDNLTKAERGGLSELDKAGFIKRQLVETRQITKHVAQILDSRMNTKYDENDKLIREVKVITLKSKLVSDFRKDFQFYKVREINNYHHAHDAYLNAVVGTALIKKYPKLESEFVYGDYKVYDVRKMIAKSEQEIGKATAKYFFYSNIMNFFKTEITLANGEIRKRPLIETNGETGEIVWDKGRDFATVRKVLSMPQVNIVKKTEVQTGGFSKESILPKRNSDKLIARKKDWDPKKYGGFDSPTVAYSVLVVAKVEKGKSKKLKSVKELLGITIMERSSFEKNPIDFLEAKGYKEVKKDLIIKLPKYSLFELENGRKRMLASAGELQKGNELALPSKYVNFLYLASHYEKLKGSPEDNEQKQLFVEQHKHYLDEIIEQISEFSKRVILADANLDKVLSAYNKHRDKPIREQAENIIHLFTLTNLGAPAAFKYFDTTIDKKRYTSTKEVLDATLIHQSITGLYETRIDLSQLGGDGAPESATESGGTSTESEGSAGTSTESEGSAGSAGSTSTEEGTSTESEGSAGTSTESEGSAGTSESATESGGTSTESEGSSSGAAFKPNPINYILGLDIGIASVGWAMVEIDEEENPIRLIDLGVRVFERAEVPKTGDSLAMARRLARSVRRLTRRRAHRLLRARRLLKREGVLQAADFDENGLIKSLPNTPWQLRAAALDRKLTPLEWSAVLLHLIKHRGYLSQRKNEGETADKELGALLKGVANNAHALQTGDFRTPAELALNKFEKESGHIRNQRGDYSHTFSRKDLQAELILLFEKQKEFGNPHVSGGLKEGIETLLMTQRPALSGDAVQKMLGHCTFEPAEPKAAKNTYTAERFIWLTKLNNLRILEQGSERPLTDTERATLMDEPYRKSKLTYAQARKLLGLEDTAFFKGLRYGKDNAEASTLMEMKAYHAISRALEKEGLKDKKSPLNLSSELQDEIGTAFSLFKTDEDITGRLKDRVQPEILEALLKHISFDKFVQISLKALRRIVPLMEQGKRYDEACAEIYGDHYGKKNTEEKIYLPPIPADEIRNPVVLRALSQARKVINGVVRRYGSPARIHIETAREVGKSFKDRKEIEKRQEENRKDREKAAAKFREYFPNFVGEPKSKDILKLRLYEQQHGKCLYSGKEINLVRLNEKGYVEIDHALPFSRTWDDSFNNKVLVLGSENQNKGNQTPYEYFNGKDNSREWQEFKARVETSRFPRSKKQRILLQKFDEDGFKECNLNDTRYVNRFLCQFVADHILLTGKGKRRVFASNGQITNLLRGFWGLRKVRAENDRHHALDAVVVACSTVAMQQKITRFVRYKEMNAFDGKTIDKETGKVLHQKTHFPQPWEFFAQEVMIRVFGKPDGKPEFEEADTPEKLRTLLAEKLSSRPEAVHEYVTPLFVSRAPNRKMSGAHKDTLRSAKRFVKHNEKISVKRVWLTEIKLADLENMVNYKNGREIELYEALKARLEAYGGNAKQAFDPKDNPFYKKGGQLVKAVRVEKTQESGVLLNKKNAYTIADNGDMVRVDVFCKVDKKGKNQYFIVPIYAWQVAENILPDIDCKGYRIDDSYTFCFSLHKYDLIAFQKDEKSKVEFAYYINCDSSNGRFYLAWHDKGSKEQQFRISTQNLVLIQKYQVNELGKEIRPCRLKKRPPVRSGKRTADGSGGGSPKKKRKV

SEQ ID NO: 93 - RNA, 4516 nt, synthetic construct
  misc_feature 1..4516: note = Synthetic: SpyCas9 (mRNA X) -mRNA sequence
  source 1..4516: mol_type = other RNA
gggtcccgcagtcggcgtccagcggctctgcttgttcgtgtgtgtgtcgttgcaggccttattcggatccgccaccatggacaagaagtacagcatcggactggacatcggaacaaacagcgtcggatgggcagtcatcacagacgaatacaaggtcccgagcaagaagttcaaggtcctgggaaacacagacagacacagcatcaagaagaacctgatcggagcactgctgttcgacagcggagaaacagcagaagcaacaagactgaagagaacagcaagaagaagatacacaagaagaaagaacagaatctgctacctgcaggaaatcttcagcaacgaaatggcaaaggtcgacgacagcttcttccacagactggaagaaagcttcctggtcgaagaagacaagaagcacgaaagacacccgatcttcggaaacatcgtcgacgaagtcgcataccacgaaaagtacccgacaatctaccacctgagaaagaagctggtcgacagcacagacaaggcagacctgagactgatctacctggcactggcacacatgatcaagttcagaggacacttcctgatcgaaggagacctgaacccggacaacagcgacgtcgacaagctgttcatccagctggtccagacatacaaccagctgttcgaagaaaacccgatcaacgcaagcggagtcgacgcaaaggcaatcctgagcgcaagactgagcaagagcagaagactggaaaacctgatcgcacagctgccgggagaaaagaagaacggactgttcggaaacctgatcgcactgagcctgggactgacaccgaacttcaagagcaacttcgacctggcagaagacgcaaagctgcagctgagcaaggacacatacgacgacgacctggacaacctgctggcacagatcggagaccagtacgcagacctgttcctggcagcaaagaacctgagcgacgcaatcctgctgagcgacatcctgagagtcaacacagaaatcacaaaggcaccgctgagcgcaagcatgatcaagagatacgacgaacaccaccaggacctgacactgctgaaggcactggtcagacagcagctgccggaaaagtacaaggaaatcttcttcgaccagagcaagaacggatacgcaggatacatcgacggaggagcaagccaggaagaattctacaagttcatcaagccgatcctggaaaagatggacggaacagaagaactgctggtcaagctgaacagagaagacctgctgagaaagcagagaacattcgacaacggaagcatcccgcaccagatccacctgggagaactgcacgcaatcctgagaagacaggaagacttctacccgttcctgaaggacaacagagaaaagatcgaaaagatcctgacattcagaatcccgtactacgtcggaccgctggcaagaggaaacagcagattcgcatggatgacaagaaagagcgaagaaacaatcacaccgtggaacttcgaagaagtcgtcgacaagggagcaagcgcacagagcttcatcgaaagaatgacaaacttcgacaagaacctgccgaacgaaaaggtcctgccgaagcacagcctgctgtacgaatacttcacagtctacaacgaactgacaaaggtcaagtacgtcacagaaggaatgagaaagccggcattcctgagcggagaacagaagaaggcaatcgtcgacctgctgttcaagacaaacagaaaggtcacagtcaagcagctgaaggaagactacttcaagaagatcgaatgcttcgacagcgtcgaaatcagcggagtcgaagacagattcaacgcaagcctgggaacataccacgacctgctgaagatcatcaaggacaaggacttcctggacaacgaagaaaacgaagacatcctggaagacatcgtcctgacactgacactgttcgaagacagagaaatgatcgaagaaagactgaagacatacgcacacctgttcgacgacaaggtcatgaagcagctgaagagaagaagatacacaggatggggaagactgagcagaaagctgatcaacggaatcagagacaagcagagcggaaagacaatcctggacttcctgaagagcgacggattcgcaaacagaaacttcatgcagctgatccacgacgacagcctgacattcaaggaagacatccagaaggcacaggtcagcggacagggagacagcctgcacgaacacatcgcaaacctggcaggaagcccggcaatcaagaagggaatcctgcagacagtcaaggtcgtcgacgaactggtcaaggtcatgggaagacacaagccggaaaacatcgtcatcgaaatggcaagagaaaaccagacaacacagaagggacagaagaacagcagagaaagaatgaagagaatcgaagaaggaatcaaggaactgggaagccagatcctgaaggaacacccggtcgaaaacacacagctgcagaacgaaaagctgtacctgtactacctgcagaacggaagagacatgtacgtcgaccaggaactggacatcaacagactgagcgactacgacgtcgaccacatcgtcccgcagagcttcctgaaggacgacagcatcgacaacaaggtcctgacaagaagcgacaagaacagaggaaagagcgacaacgtcccgagcgaagaagtcgtcaagaagatgaagaactactggagacagctgctgaacgcaaagctgatcacacagagaaagttcgacaacctgacaaaggcagagagaggaggactgagcgaactggacaaggcaggattcatcaagagacagctggtcgaaacaagacagatcacaaagcacgtcgcacagatcctggacagcagaatgaacacaaagtacgacgaaaacgacaagctgatcagagaagtcaaggtcatcacactgaagagcaagctggtcagcgacttcagaaaggacttccagttctacaaggtcagagaaatcaacaactaccaccacgcacacgacgcatacctgaacgcagtcgtcggaacagcactgatcaagaagtacccgaagctggaaagcgaattcgtctacggagactacaaggtctacgacgtcagaaagatgatcgcaaagagcgaacaggaaatcggaaaggcaacagcaaagtacttcttctacagcaacatcatgaacttcttcaagacagaaatcacactggcaaacggagaaatcagaaagagaccgctgatcgaaacaaacggagaaacaggagaaatcgtctgggacaagggaagagacttcgcaacagtcagaaaggtcctgagcatgccgcaggtcaacatcgtcaagaagacagaagtccagacaggaggattcagcaaggaaagcatcctgccgaagagaaacagcgacaagctgatcgcaagaaagaaggactgggacccgaagaagtacggaggattcgacagcccgacagtcgcatacagcgtcctggtcgtcgcaaaggtcgaaaagggaaagagcaagaagctgaagagcgtcaaggaactgctgggaatcacaatcatggaaagaagcagcttcgaaaagaacccgatcgacttcctggaagcaaagggatacaaggaagtcaagaaggacctgatcatcaagctgccgaagtacagcctgttcgaactggaaaacggaagaaagagaatgctggcaagcgcaggagaactgcagaagggaaacgaactggcactgccgagcaagtacgtcaacttcctgtacctggcaagccactacgaaaagctgaagggaagcccggaagacaacgaacagaagcagctgttcgtcgaacagcacaagcactacctggacgaaatcatcgaacagatcagcgaattcagcaagagagtcatcctggcagacgcaaacctggacaaggtcctgagcgcatacaacaagcacagagacaagccgatcagagaacaggcagaaaacatcatccacctgttcacactgacaaacctgggagcaccggcagcattcaagtacttcgacacaacaatcgacagaaagagatacacaagcacaaaggaagtcctggacgcaacactgatccaccagagcatcacaggactgtacgaaacaagaatcgacctgagccagctgggaggagacggaggaggaagcccgaagaagaagagaaaggtctagctagccatcacatttaaaagcatctcagcctaccatgagaataagagaaagaaaatgaagatcaatagcttattcatctctttttctttttcgttggtgtaaagccaacaccctgtctaaaaaacataaatttctttaatcattttgcctcttttctctgtgcttcaattaataaaaaatggaaagaacctcgagaaaaaaaaaaaaaaaaaaaaaaaaaaaaaaaaaaaaaaaaaaaaaaaaaaaaaaaaaaaaaaaaaaaaaaaaaaaaaaaaaaaaaaaaaaaaaaaaaaaatctag

SEQ ID NO: 94 - RNA, 4140 nt, synthetic construct
  misc_feature 1..4140: note = Synthetic: SpyCas9 (mRNA X) -ORF sequence
  source 1..4140: mol_type = other RNA
atggacaagaagtacagcatcggactggacatcggaacaaacagcgtcggatgggcagtcatcacagacgaatacaaggtcccgagcaagaagttcaaggtcctgggaaacacagacagacacagcatcaagaagaacctgatcggagcactgctgttcgacagcggagaaacagcagaagcaacaagactgaagagaacagcaagaagaagatacacaagaagaaagaacagaatctgctacctgcaggaaatcttcagcaacgaaatggcaaaggtcgacgacagcttcttccacagactggaagaaagcttcctggtcgaagaagacaagaagcacgaaagacacccgatcttcggaaacatcgtcgacgaagtcgcataccacgaaaagtacccgacaatctaccacctgagaaagaagctggtcgacagcacagacaaggcagacctgagactgatctacctggcactggcacacatgatcaagttcagaggacacttcctgatcgaaggagacctgaacccggacaacagcgacgtcgacaagctgttcatccagctggtccagacatacaaccagctgttcgaagaaaacccgatcaacgcaagcggagtcgacgcaaaggcaatcctgagcgcaagactgagcaagagcagaagactggaaaacctgatcgcacagctgccgggagaaaagaagaacggactgttcggaaacctgatcgcactgagcctgggactgacaccgaacttcaagagcaacttcgacctggcagaagacgcaaagctgcagctgagcaaggacacatacgacgacgacctggacaacctgctggcacagatcggagaccagtacgcagacctgttcctggcagcaaagaacctgagcgacgcaatcctgctgagcgacatcctgagagtcaacacagaaatcacaaaggcaccgctgagcgcaagcatgatcaagagatacgacgaacaccaccaggacctgacactgctgaaggcactggtcagacagcagctgccggaaaagtacaaggaaatcttcttcgaccagagcaagaacggatacgcaggatacatcgacggaggagcaagccaggaagaattctacaagttcatcaagccgatcctggaaaagatggacggaacagaagaactgctggtcaagctgaacagagaagacctgctgagaaagcagagaacattcgacaacggaagcatcccgcaccagatccacctgggagaactgcacgcaatcctgagaagacaggaagacttctacccgttcctgaaggacaacagagaaaagatcgaaaagatcctgacattcagaatcccgtactacgtcggaccgctggcaagaggaaacagcagattcgcatggatgacaagaaagagcgaagaaacaatcacaccgtggaacttcgaagaagtcgtcgacaagggagcaagcgcacagagcttcatcgaaagaatgacaaacttcgacaagaacctgccgaacgaaaaggtcctgccgaagcacagcctgctgtacgaatacttcacagtctacaacgaactgacaaaggtcaagtacgtcacagaaggaatgagaaagccggcattcctgagcggagaacagaagaaggcaatcgtcgacctgctgttcaagacaaacagaaaggtcacagtcaagcagctgaaggaagactacttcaagaagatcgaatgcttcgacagcgtcgaaatcagcggagtcgaagacagattcaacgcaagcctgggaacataccacgacctgctgaagatcatcaaggacaaggacttcctggacaacgaagaaaacgaagacatcctggaagacatcgtcctgacactgacactgttcgaagacagagaaatgatcgaagaaagactgaagacatacgcacacctgttcgacgacaaggtcatgaagcagctgaagagaagaagatacacaggatggggaagactgagcagaaagctgatcaacggaatcagagacaagcagagcggaaagacaatcctggacttcctgaagagcgacggattcgcaaacagaaacttcatgcagctgatccacgacgacagcctgacattcaaggaagacatccagaaggcacaggtcagcggacagggagacagcctgcacgaacacatcgcaaacctggcaggaagcccggcaatcaagaagggaatcctgcagacagtcaaggtcgtcgacgaactggtcaaggtcatgggaagacacaagccggaaaacatcgtcatcgaaatggcaagagaaaaccagacaacacagaagggacagaagaacagcagagaaagaatgaagagaatcgaagaaggaatcaaggaactgggaagccagatcctgaaggaacacccggtcgaaaacacacagctgcagaacgaaaagctgtacctgtactacctgcagaacggaagagacatgtacgtcgaccaggaactggacatcaacagactgagcgactacgacgtcgaccacatcgtcccgcagagcttcctgaaggacgacagcatcgacaacaaggtcctgacaagaagcgacaagaacagaggaaagagcgacaacgtcccgagcgaagaagtcgtcaagaagatgaagaactactggagacagctgctgaacgcaaagctgatcacacagagaaagttcgacaacctgacaaaggcagagagaggaggactgagcgaactggacaaggcaggattcatcaagagacagctggtcgaaacaagacagatcacaaagcacgtcgcacagatcctggacagcagaatgaacacaaagtacgacgaaaacgacaagctgatcagagaagtcaaggtcatcacactgaagagcaagctggtcagcgacttcagaaaggacttccagttctacaaggtcagagaaatcaacaactaccaccacgcacacgacgcatacctgaacgcagtcgtcggaacagcactgatcaagaagtacccgaagctggaaagcgaattcgtctacggagactacaaggtctacgacgtcagaaagatgatcgcaaagagcgaacaggaaatcggaaaggcaacagcaaagtacttcttctacagcaacatcatgaacttcttcaagacagaaatcacactggcaaacggagaaatcagaaagagaccgctgatcgaaacaaacggagaaacaggagaaatcgtctgggacaagggaagagacttcgcaacagtcagaaaggtcctgagcatgccgcaggtcaacatcgtcaagaagacagaagtccagacaggaggattcagcaaggaaagcatcctgccgaagagaaacagcgacaagctgatcgcaagaaagaaggactgggacccgaagaagtacggaggattcgacagcccgacagtcgcatacagcgtcctggtcgtcgcaaaggtcgaaaagggaaagagcaagaagctgaagagcgtcaaggaactgctgggaatcacaatcatggaaagaagcagcttcgaaaagaacccgatcgacttcctggaagcaaagggatacaaggaagtcaagaaggacctgatcatcaagctgccgaagtacagcctgttcgaactggaaaacggaagaaagagaatgctggcaagcgcaggagaactgcagaagggaaacgaactggcactgccgagcaagtacgtcaacttcctgtacctggcaagccactacgaaaagctgaagggaagcccggaagacaacgaacagaagcagctgttcgtcgaacagcacaagcactacctggacgaaatcatcgaacagatcagcgaattcagcaagagagtcatcctggcagacgcaaacctggacaaggtcctgagcgcatacaacaagcacagagacaagccgatcagagaacaggcagaaaacatcatccacctgttcacactgacaaacctgggagcaccggcagcattcaagtacttcgacacaacaatcgacagaaagagatacacaagcacaaaggaagtcctggacgcaacactgatccaccagagcatcacaggactgtacgaaacaagaatcgacctgagccagctgggaggagacggaggaggaagcccgaagaagaagagaaaggtctag

SEQ ID NO: 95 - protein, 1379 aa, synthetic construct; identical to SEQ ID NO: 19
  REGION 1..1379: note = Synthetic: SpyCas9 (mRNA X) -amino acid sequence

SEQ ID NO: 96 - RNA, 7671 nt, synthetic construct
  misc_feature 1..7671: note = Synthetic: SpyCas9-Nme cleavase fusion ORF
  source 1..7671: mol_type = other RNA
atggacaagaagtacagcatcggactggacatcggaacaaacagcgtcggatgggcagtcatcacagacgaatacaaggtcccgagcaagaagttcaaggtcctgggaaacacagacagacacagcatcaagaagaacctgatcggagcactgctgttcgacagcggagaaacagcagaagcaacaagactgaagagaacagcaagaagaagatacacaagaagaaagaacagaatctgctacctgcaggaaatcttcagcaacgaaatggcaaaggtcgacgacagcttcttccacagactggaagaaagcttcctggtcgaagaagacaagaagcacgaaagacacccgatcttcggaaacatcgtcgacgaagtcgcataccacgaaaagtacccgacaatctaccacctgagaaagaagctggtcgacagcacagacaaggcagacctgagactgatctacctggcactggcacacatgatcaagttcagaggacacttcctgatcgaaggagacctgaacccggacaacagcgacgtcgacaagctgttcatccagctggtccagacatacaaccagctgttcgaagaaaacccgatcaacgcaagcggagtcgacgcaaaggcaatcctgagcgcaagactgagcaagagcagaagactggaaaacctgatcgcacagctgccgggagaaaagaagaacggactgttcggaaacctgatcgcactgagcctgggactgacaccgaacttcaagagcaacttcgacctggcagaagacgcaaagctgcagctgagcaaggacacatacgacgacgacctggacaacctgctggcacagatcggagaccagtacgcagacctgttcctggcagcaaagaacctgagcgacgcaatcctgctgagcgacatcctgagagtcaacacagaaatcacaaaggcaccgctgagcgcaagcatgatcaagagatacgacgaacaccaccaggacctgacactgctgaaggcactggtcagacagcagctgccggaaaagtacaaggaaatcttcttcgaccagagcaagaacggatacgcaggatacatcgacggaggagcaagccaggaagaattctacaagttcatcaagccgatcctggaaaagatggacggaacagaagaactgctggtcaagctgaacagagaagacctgctgagaaagcagagaacattcgacaacggaagcatcccgcaccagatccacctgggagaactgcacgcaatcctgagaagacaggaagacttctacccgttcctgaaggacaacagagaaaagatcgaaaagatcctgacattcagaatcccgtactacgtcggaccgctggcaagaggaaacagcagattcgcatggatgacaagaaagagcgaagaaacaatcacaccgtggaacttcgaagaagtcgtcgacaagggagcaagcgcacagagcttcatcgaaagaatgacaaacttcgacaagaacctgccgaacgaaaaggtcctgccgaagcacagcctgctgtacgaatacttcacagtctacaacgaactgacaaaggtcaagtacgtcacagaaggaatgagaaagccggcattcctgagcggagaacagaagaaggcaatcgtcgacctgctgttcaagacaaacagaaaggtcacagtcaagcagctgaaggaagactacttcaagaagatcgaatgcttcgacagcgtcgaaatcagcggagtcgaagacagattcaacgcaagcctgggaacataccacgacctgctgaagatcatcaaggacaaggacttcctggacaacgaagaaaacgaagacatcctggaagacatcgtcctgacactgacactgttcgaagacagagaaatgatcgaagaaagactgaagacatacgcacacctgttcgacgacaaggtcatgaagcagctgaagagaagaagatacacaggatggggaagactgagcagaaagctgatcaacggaatcagagacaagcagagcggaaagacaatcctggacttcctgaagagcgacggattcgcaaacagaaacttcatgcagctgatccacgacgacagcctgacattcaaggaagacatccagaaggcacaggtcagcggacagggagacagcctgcacgaacacatcgcaaacctggcaggaagcccggcaatcaagaagggaatcctgcagacagtcaaggtcgtcgacgaactggtcaaggtcatgggaagacacaagccggaaaacatcgtcatcgaaatggcaagagaaaaccagacaacacagaagggacagaagaacagcagagaaagaatgaagagaatcgaagaaggaatcaaggaactgggaagccagatcctgaaggaacacccggtcgaaaacacacagctgcagaacgaaaagctgtacctgtactacctgcagaacggaagagacatgtacgtcgaccaggaactggacatcaacagactgagcgactacgacgtcgaccacatcgtcccgcagagcttcctgaaggacgacagcatcgacaacaaggtcctgacaagaagcgacaagaacagaggaaagagcgacaacgtcccgagcgaagaagtcgtcaagaagatgaagaactactggagacagctgctgaacgcaaagctgatcacacagagaaagttcgacaacctgacaaaggcagagagaggaggactgagcgaactggacaaggcaggattcatcaagagacagctggtcgaaacaagacagatcacaaagcacgtcgcacagatcctggacagcagaatgaacacaaagtacgacgaaaacgacaagctgatcagagaagtcaaggtcatcacactgaagagcaagctggtcagcgacttcagaaaggacttccagttctacaaggtcagagaaatcaacaactaccaccacgcacacgacgcatacctgaacgcagtcgtcggaacagcactgatcaagaagtacccgaagctggaaagcgaattcgtctacggagactacaaggtctacgacgtcagaaagatgatcgcaaagagcgaacaggaaatcggaaaggcaacagcaaagtacttcttctacagcaacatcatgaacttcttcaagacagaaatcacactggcaaacggagaaatcagaaagagaccgctgatcgaaacaaacggagaaacaggagaaatcgtctgggacaagggaagagacttcgcaacagtcagaaaggtcctgagcatgccgcaggtcaacatcgtcaagaagacagaagtccagacaggaggattcagcaaggaaagcatcctgccgaagagaaacagcgacaagctgatcgcaagaaagaaggactgggacccgaagaagtacggaggattcgacagcccgacagtcgcatacagcgtcctggtcgtcgcaaaggtcgaaaagggaaagagcaagaagctgaagagcgtcaaggaactgctgggaatcacaatcatggaaagaagcagcttcgaaaagaacccgatcgacttcctggaagcaaagggatacaaggaagtcaagaaggacctgatcatcaagctgccgaagtacagcctgttcgaactggaaaacggaagaaagagaatgctggcaagcgcaggagaactgcagaagggaaacgaactggcactgccgagcaagtacgtcaacttcctgtacctggcaagccactacgaaaagctgaagggaagcccggaagacaacgaacagaagcagctgttcgtcgaacagcacaagcactacctggacgaaatcatcgaacagatcagcgaattcagcaagagagtcatcctggcagacgcaaacctggacaaggtcctgagcgcatacaacaagcacagagacaagccgatcagagaacaggcagaaaacatcatccacctgttcacactgacaaacctgggagcaccggcagcattcaagtacttcgacacaacaatcgacagaaagagatacacaagcacaaaggaagtcctggacgcaacactgatccaccagagcatcacaggactgtacgaaacaagaatcgacctgagccagctgggaggagacggcgcgcctgagtctgctacagaaagtgggggaacctccacagagtctgaaggaagtgccggcacttcaaccgagagcgaagggtccgctggatctgcaggctccacatctactgaggaaggcaccagtacagagtcagaaggcagcgccggaacttccaccgagtctgaaggcagtgccgggacaagtgaatcagctactgaaagcggcgggacatcaactgagagcgaaggatccagttccggagcagcattcaagccgaactcgatcaactacatcctgggactggacatcggaatcgcatcggtcggatgggcaatggtcgaaatcgacgaagaagaaaacccgatcagactgatcgacctgggagtcagagtcttcgaaagagcagaagtcccgaagacaggagactcgctggcaatggcaagaagactggcaagatcggtcagaagactgacaagaagaagagcacacagactgctgagaacaagaagactgctgaagagagaaggagtcctgcaggcagcaaacttcgacgaaaacggactgatcaagtcgctgccgaacacaccgtggcagctgagagcagcagcactggacagaaagctgacaccgctggaatggtcggcagtcctgctgcacctgatcaagcacagaggatacctgtcgcagagaaagaacgaaggagaaacagcagacaaggaactgggagcactgctgaagggagtcgcaggaaacgcacacgcactgcagacaggagacttcagaacaccggcagaactggcactgaacaagttcgaaaaggaatcgggacacatcagaaaccagagatcggactactcgcacacattctcgagaaaggacctgcaggcagaactgatcctgctgttcgaaaagcagaaggaattcggaaacccgcacgtctcgggaggactgaaggaaggaatcgaaacactgctgatgacacagagaccggcactgtcgggagacgcagtccagaagatgctgggacactgcacattcgaaccggcagaaccgaaggcagcaaagaacacatacacagcagaaagattcatctggctgacaaagctgaacaacctgagaatcctggaacagggatcggaaagaccgctgacagacacagaaagagcaacactgatggacgaaccgtacagaaagtcgaagctgacatacgcacaggcaagaaagctgctgggactggaagacacagcattcttcaagggactgagatacggaaaggacaacgcagaagcatcgacactgatggaaatgaaggcataccacgcaatctcgagagcactggaaaaggaaggactgaaggacaagaagtcgccgctgaacctgtcgccggaactgcaggacgaaatcggaacagcattctcgctgttcaagacagacgaagacatcacaggaagactgaaggacagaatccagccggaaatcctggaagcactgctgaagcacatctcgttcgacaagttcgtccagatctcgctgaaggcactgagaagaatcgtcccgctgatggaacagggaaagagatacgacgaagcatgcgcagaaatctacggagaccactacggaaagaagaacacagaagaaaagatctacctgccgccgatcccggcagacgaaatcagaaacccggtcgtcctgagagcactgtcgcaggcaagaaaggtcatcaacggagtcgtcagaagatacggatcgccggcaagaatccacatcgaaacagcaagagaagtcggaaagtcgttcaaggacagaaaggaaatcgaaaagagacaggaagaaaacagaaaggacagagaaaaggcagcagcaaagttcagagaatacttcccgaacttcgtcggagaaccgaagtcgaaggacatcctgaagctgagactgtacgaacagcagcacggaaagtgcctgtactcgggaaaggaaatcaacctgggaagactgaacgaaaagggatacgtcgaaatcgaccacgcactgccgttctcgagaacatgggacgactcgttcaacaacaaggtcctggtcctgggatcggaaaaccagaacaagggaaaccagacaccgtacgaatacttcaacggaaaggacaactcgagagaatggcaggaattcaaggcaagagtcgaaacatcgagattcccgagatcgaagaagcagagaatcctgctgcagaagttcgacgaagacggattcaaggaaagaaacctgaacgacacaagatacgtcaacagattcctgtgccagttcgtcgcagacagaatgagactgacaggaaagggaaagaagagagtcttcgcatcgaacggacagatcacaaacctgctgagaggattctggggactgagaaaggtcagagcagaaaacgacagacaccacgcactggacgcagtcgtcgtcgcatgctcgacagtcgcaatgcagcagaagatcacaagattcgtcagatacaaggaaatgaacgcattcgacggaaagacaatcgacaaggaaacaggagaagtcctgcaccagaagacacacttcccgcagccgtgggaattcttcgcacaggaagtcatgatcagagtcttcggaaagccggacggaaagccggaattcgaagaagcagacacactggaaaagctgagaacactgctggcagaaaagctgtcgtcgagaccggaagcagtccacgaatacgtcacaccgctgttcgtctcgagagcaccgaacagaaagatgtcgggacagggacacatggaaacagtcaagtcggcaaagagactggacgaaggagtctcggtcctgagagtcccgctgacacagctgaagctgaaggacctggaaaagatggtcaacagagaaagagaaccgaagctgtacgaagcactgaaggcaagactggaagcacacaaggacgacccggcaaaggcattcgcagaaccgttctacaagtacgacaaggcaggaaacagaacacagcaggtcaaggcagtcagagtcgaacaggtccagaagacaggagtctgggtcagaaaccacaacggaatcgcagacaacgcaacaatggtcagagtagacgtcttcgaaaagggagacaagtactacctggtcccgatctactcgtggcaggtcgcaaagggaatcctgccggacagagcagtcgtccagggaaaggacgaagaagactggcagctgatcgacgactcgttcaacttcaagttctcgctgcacccgaacgacctggtcgaagtcatcacaaagaaggcaagaatgttcggatacttcgcatcgtgccacagaggaacaggaaacatcaacatcagaatccacgacctggaccacaagatcggaaagaacggaatcctggaaggaatcggagtcaagacagcactgtcgttccagaagtaccagatcgacgaactgggaaaggaaatcagaccgtgcagactgaagaagagaccgccggtcagagggggcagcggcgggtctaagaggaccgccgatgggagtgagtttgaaagccctaaaaagaaaagaaaagtggaatga

SEQ ID NO: 97 - protein, 2556 aa, synthetic construct
  REGION 1..2556: note = Synthetic: SpyCas9-Nme cleavase fusion amino acid sequence
MDKKYSIGLDIGTNSVGWAVITDEYKVPSKKFKVLGNTDRHSIKKNLIGALLFDSGETAEATRLKRTARRRYTRRKNRICYLQEIFSNEMAKVDDSFFHRLEESFLVEEDKKHERHPIFGNIVDEVAYHEKYPTIYHLRKKLVDSTDKADLRLIYLALAHMIKFRGHFLIEGDLNPDNSDVDKLFIQLVQTYNQLFEENPINASGVDAKAILSARLSKSRRLENLIAQLPGEKKNGLFGNLIALSLGLTPNFKSNFDLAEDAKLQLSKDTYDDDLDNLLAQIGDQYADLFLAAKNLSDAILLSDILRVNTEITKAPLSASMIKRYDEHHQDLTLLKALVRQQLPEKYKEIFFDQSKNGYAGYIDGGASQEEFYKFIKPILEKMDGTEELLVKLNREDLLRKQRTFDNGSIPHQIHLGELHAILRRQEDFYPFLKDNREKIEKILTFRIPYYVGPLARGNSRFAWMTRKSEETITPWNFEEVVDKGASAQSFIERMTNFDKNLPNEKVLPKHSLLYEYFTVYNELTKVKYVTEGMRKPAFLSGEQKKAIVDLLFKTNRKVTVKQLKEDYFKKIECFDSVEISGVEDRFNASLGTYHDLLKIIKDKDFLDNEENEDILEDIVLTLTLFEDREMIEERLKTYAHLFDDKVMKQLKRRRYTGWGRLSRKLINGIRDKQSGKTILDFLKSDGFANRNFMQLIHDDSLTFKEDIQKAQVSGQGDSLHEHIANLAGSPAIKKGILQTVKVVDELVKVMGRHKPENIVIEMARENQTTQKGQKNSRERMKRIEEGIKELGSQILKEHPVENTQLQNEKLYLYYLQNGRDMYVDQELDINRLSDYDVDHIVPQSFLKDDSIDNKVLTRSDKNRGKSDNVPSEEVVKKMKNYWRQLLNAKLITQRKFDNLTKAERGGLSELDKAGFIKRQLVETRQITKHVAQILDSRMNTKYDENDKLIREVKVITLKSKLVSDFRKDFQFYKVREINNYHHAHDAYLNAVVGTALIKKYPKLESEFVYGDYKVYDVRKMIAKSEQEIGKATAKYFFYSNIMNFFKTEITLANGEIRKRPLIETNGETGEIVWDKGRDFATVRKVLSMPQVNIVKKTEVQTGGFSKESILPKRNSDKLIARKKDWDPKKYGGFDSPTVAYSVLVVAKVEKGKSKKLKSVKELLGITIMERSSFEKNPIDFLEAKGYKEVKKDLIIKLPKYSLFELENGRKRMLASAGELQKGNELALPSKYVNFLYLASHYEKLKGSPEDNEQKQLFVEQHKHYLDEIIEQISEFSKRVILADANLDKVLSAYNKHRDKPIREQAENIIHLFTLTNLGAPAAFKYFDTTIDRKRYTSTKEVLDATLIHQSITGLYETRIDLSQLGGDGAPESATESGGTSTESEGSAGTSTESEGSAGSAGSTSTEEGTSTESEGSAGTSTESEGSAGTSESATESGGTSTESEGSSSGAAFKPNSINYILGLDIGIASVGWAMVEIDEEENPIRLIDLGVRVFERAEVPKTGDSLAMARRLARSVRRLTRRRAHRLLRTRRLLKREGVLQAANFDENGLIKSLPNTPWQLRAAALDRKLTPLEWSAVLLHLIKHRGYLSQRKNEGETADKELGALLKGVAGNAHALQTGDFRTPAELALNKFEKESGHIRNQRSDYSHTFSRKDLQAELILLFEKQKEFGNPHVSGGLKEGIETLLMTQRPALSGDAVQKMLGHCTFEPAEPKAAKNTYTAERFIWLTKLNNLRILEQGSERPLTDTERATLMDEPYRKSKLTYAQARKLLGLEDTAFFKGLRYGKDNAEASTLMEMKAYHAISRALEKEGLKDKKSPLNLSPELQDEIGTAFSLFKTDEDITGRLKDRIQPEILEALLKHISFDKFVQISLKALRRIVPLMEQGKRYDEACAEIYGDHYGKKNTEEKIYLPPIPADEIRNPVVLRALSQARKVINGVVRRYGSPARIHIETAREVGKSFKDRKEIEKRQEENRKDREKAAAKFREYFPNFVGEPKSKDILKLRLYEQQHGKCLYSGKEINLGRLNEKGYVEIDHALPFSRTWDDSFNNKVLVLGSENQNKGNQTPYEYFNGKDNSREWQEFKARVETSRFPRSKKQRILLQKFDEDGFKERNLNDTRYVNRFLCQFVADRMRLTGKGKKRVFASNGQITNLLRGFWGLRKVRAENDRHHALDAVVVACSTVAMQQKITRFVRYKEMNAFDGKTIDKETGEVLHQKTHFPQPWEFFAQEVMIRVFGKPDGKPEFEEADTLEKLRTLLAEKLSSRPEAVHEYVTPLFVSRAPNRKMSGQGHMETVKSAKRLDEGVSVLRVPLTQLKLKDLEKMVNREREPKLYEALKARLEAHKDDPAKAFAEPFYKYDKAGNRTQQVKAVRVEQVQKTGVWVRNHNGIADNATMVRVDVFEKGDKYYLVPIYSWQVAKGILPDRAVVQGKDEEDWQLIDDSFNFKFSLHPNDLVEVITKKARMFGYFASCHRGTGNINIRIHDLDHKIGKNGILEGIGVKTALSFQKYQIDELGKEIRPCRLKKRPPVRGGSGGSKRTADGSEFESPKKKRKVE

SEQ ID NO: 98 - RNA, 7659 nt, synthetic construct
  misc_feature 1..7659: note = Synthetic: Spy -R1335S Cas9-WT NmeCas9 fusion ORF
  source 1..7659: mol_type = other RNA
atggacaagaagtacagcatcggactggacatcggaacaaacagcgtcggatgggcagtcatcacagacgaatacaaggtcccgagcaagaagttcaaggtcctgggaaacacagacagacacagcatcaagaagaacctgatcggagcactgctgttcgacagcggagaaacagcagaagcaacaagactgaagagaacagcaagaagaagatacacaagaagaaagaacagaatctgctacctgcaggaaatcttcagcaacgaaatggcaaaggtcgacgacagcttcttccacagactggaagaaagcttcctggtcgaagaagacaagaagcacgaaagacacccgatcttcggaaacatcgtcgacgaagtcgcataccacgaaaagtacccgacaatctaccacctgagaaagaagctggtcgacagcacagacaaggcagacctgagactgatctacctggcactggcacacatgatcaagttcagaggacacttcctgatcgaaggagacctgaacccggacaacagcgacgtcgacaagctgttcatccagctggtccagacatacaaccagctgttcgaagaaaacccgatcaacgcaagcggagtcgacgcaaaggcaatcctgagcgcaagactgagcaagagcagaagactggaaaacctgatcgcacagctgccgggagaaaagaagaacggactgttcggaaacctgatcgcactgagcctgggactgacaccgaacttcaagagcaacttcgacctggcagaagacgcaaagctgcagctgagcaaggacacatacgacgacgacctggacaacctgctggcacagatcggagaccagtacgcagacctgttcctggcagcaaagaacctgagcgacgcaatcctgctgagcgacatcctgagagtcaacacagaaatcacaaaggcaccgctgagcgcaagcatgatcaagagatacgacgaacaccaccaggacctgacactgctgaaggcactggtcagacagcagctgccggaaaagtacaaggaaatcttcttcgaccagagcaagaacggatacgcaggatacatcgacggaggagcaagccaggaagaattctacaagttcatcaagccgatcctggaaaagatggacggaacagaagaactgctggtcaagctgaacagagaagacctgctgagaaagcagagaacattcgacaacggaagcatcccgcaccagatccacctgggagaactgcacgcaatcctgagaagacaggaagacttctacccgttcctgaaggacaacagagaaaagatcgaaaagatcctgacattcagaatcccgtactacgtcggaccgctggcaagaggaaacagcagattcgcatggatgacaagaaagagcgaagaaacaatcacaccgtggaacttcgaagaagtcgtcgacaagggagcaagcgcacagagcttcatcgaaagaatgacaaacttcgacaagaacctgccgaacgaaaaggtcctgccgaagcacagcctgctgtacgaatacttcacagtctacaacgaactgacaaaggtcaagtacgtcacagaaggaatgagaaagccggcattcctgagcggagaacagaagaaggcaatcgtcgacctgctgttcaagacaaacagaaaggtcacagtcaagcagctgaaggaagactacttcaagaagatcgaatgcttcgacagcgtcgaaatcagcggagtcgaagacagattcaacgcaagcctgggaacataccacgacctgctgaagatcatcaaggacaaggacttcctggacaacgaagaaaacgaagacatcctggaagacatcgtcctgacactgacactgttcgaagacagagaaatgatcgaagaaagactgaagacatacgcacacctgttcgacgacaaggtcatgaagcagctgaagagaagaagatacacaggatggggaagactgagcagaaagctgatcaacggaatcagagacaagcagagcggaaagacaatcctggacttcctgaagagcgacggattcgcaaacagaaacttcatgcagctgatccacgacgacagcctgacattcaaggaagacatccagaaggcacaggtcagcggacagggagacagcctgcacgaacacatcgcaaacctggcaggaagcccggcaatcaagaagggaatcctgcagacagtcaaggtcgtcgacgaactggtcaaggtcatgggaagacacaagccggaaaacatcgtcatcgaaatggcaagagaaaaccagacaacacagaagggacagaagaacagcagagaaagaatgaagagaatcgaagaaggaatcaaggaactgggaagccagatcctgaaggaacacccggtcgaaaacacacagctgcagaacgaaaagctgtacctgtactacctgcagaacggaagagacatgtacgtcgaccaggaactggacatcaacagactgagcgactacgacgtcgaccacatcgtcccgcagagcttcctgaaggacgacagcatcgacaacaaggtcctgacaagaagcgacaagaacagaggaaagagcgacaacgtcccgagcgaagaagtcgtcaagaagatgaagaactactggagacagctgctgaacgcaaagctgatcacacagagaaagttcgacaacctgacaaaggcagagagaggaggactgagcgaactggacaaggcaggattcatcaagagacagctggtcgaaacaagacagatcacaaagcacgtcgcacagatcctggacagcagaatgaacacaaagtacgacgaaaacgacaagctgatcagagaagtcaaggtcatcacactgaagagcaagctggtcagcgacttcagaaaggacttccagttctacaaggtcagagaaatcaacaactaccaccacgcacacgacgcatacctgaacgcagtcgtcggaacagcactgatcaagaagtacccgaagctggaaagcgaattcgtctacggagactacaaggtctacgacgtcagaaagatgatcgcaaagagcgaacaggaaatcggaaaggcaacagcaaagtacttcttctacagcaacatcatgaacttcttcaagacagaaatcacactggcaaacggagaaatcagaaagagaccgctgatcgaaacaaacggagaaacaggagaaatcgtctgggacaagggaagagacttcgcaacagtcagaaaggtcctgagcatgccgcaggtcaacatcgtcaagaagacagaagtccagacaggaggattcagcaaggaaagcatcctgccgaagagaaacagcgacaagctgatcgcaagaaagaaggactgggacccgaagaagtacggaggattcgacagcccgacagtcgcatacagcgtcctggtcgtcgcaaaggtcgaaaagggaaagagcaagaagctgaagagcgtcaaggaactgctgggaatcacaatcatggaaagaagcagcttcgaaaagaacccgatcgacttcctggaagcaaagggatacaaggaagtcaagaaggacctgatcatcaagctgccgaagtacagcctgttcgaactggaaaacggaagaaagagaatgctggcaagcgcaggagaactgcagaagggaaacgaactggcactgccgagcaagtacgtcaacttcctgtacctggcaagccactacgaaaagctgaagggaagcccggaagacaacgaacagaagcagctgttcgtcgaacagcacaagcactacctggacgaaatcatcgaacagatcagcgaattcagcaagagagtcatcctggcagacgcaaacctggacaaggtcctgagcgcatacaacaagcacagagacaagccgatcagagaacaggcagaaaacatcatccacctgttcacactgacaaacctgggagcaccggcagcattcaagtacttcgacacaacaatcgacagaaagtcatacacaagcacaaaggaagtcctggacgcaacactgatccaccagagcatcacaggactgtacgaaacaagaatcgacctgagccagctgggaggagacggcgcgcctgagtctgctacagaaagtgggggaacctccacagagtctgaaggaagtgccggcacttcaaccgagagcgaagggtccgctggatctgcaggctccacatctactgaggaaggcaccagtacagagtcagaaggcagcgccggaacttccaccgagtctgaaggcagtgccgggacaagtgaatcagctactgaaagcggcgggacatcaactgagagcgaaggatccagttccggagcagcattcaagccgaactcgatcaactacatcctgggactggacatcggaatcgcatcggtcggatgggcaatggtcgaaatcgacgaagaagaaaacccgatcagactgatcgacctgggagtcagagtcttcgaaagagcagaagtcccgaagacaggagactcgctggcaatggcaagaagactggcaagatcggtcagaagactgacaagaagaagagcacacagactgctgagaacaagaagactgctgaagagagaaggagtcctgcaggcagcaaacttcgacgaaaacggactgatcaagtcgctgccgaacacaccgtggcagctgagagcagcagcactggacagaaagctgacaccgctggaatggtcggcagtcctgctgcacctgatcaagcacagaggatacctgtcgcagagaaagaacgaaggagaaacagcagacaaggaactgggagcactgctgaagggagtcgcaggaaacgcacacgcactgcagacaggagacttcagaacaccggcagaactggcactgaacaagttcgaaaaggaatcgggacacatcagaaaccagagatcggactactcgcacacattctcgagaaaggacctgcaggcagaactgatcctgctgttcgaaaagcagaaggaattcggaaacccgcacgtctcgggaggactgaaggaaggaatcgaaacactgctgatgacacagagaccggcactgtcgggagacgcagtccagaagatgctgggacactgcacattcgaaccggcagaaccgaaggcagcaaagaacacatacacagcagaaagattcatctggctgacaaagctgaacaacctgagaatcctggaacagggatcggaaagaccgctgacagacacagaaagagcaacactgatggacgaaccgtacagaaagtcgaagctgacatacgcacaggcaagaaagctgctgggactggaagacacagcattcttcaagggactgagatacggaaaggacaacgcagaagcatcgacactgatggaaatgaaggcataccacgcaatctcgagagcactggaaaaggaaggactgaaggacaagaagtcgccgctgaacctgtcgccggaactgcaggacgaaatcggaacagcattctcgctgttcaagacagacgaagacatcacaggaagactgaaggacagaatccagccggaaatcctggaagcactgctgaagcacatctcgttcgacaagttcgtccagatctcgctgaaggcactgagaagaatcgtcccgctgatggaacagggaaagagatacgacgaagcatgcgcagaaatctacggagaccactacggaaagaagaacacagaagaaaagatctacctgccgccgatcccggcagacgaaatcagaaacccggtcgtcctgagagcactgtcgcaggcaagaaaggtcatcaacggagtcgtcagaagatacggatcgccggcaagaatccacatcgaaacagcaagagaagtcggaaagtcgttcaaggacagaaaggaaatcgaaaagagacaggaagaaaacagaaaggacagagaaaaggcagcagcaaagttcagagaatacttcccgaacttcgtcggagaaccgaagtcgaaggacatcctgaagctgagactgtacgaacagcagcacggaaagtgcctgtactcgggaaaggaaatcaacctgggaagactgaacgaaaagggatacgtcgaaatcgaccacgcactgccgttctcgagaacatgggacgactcgttcaacaacaaggtcctggtcctgggatcggaaaaccagaacaagggaaaccagacaccgtacgaatacttcaacggaaaggacaactcgagagaatggcaggaattcaaggcaagagtcgaaacatcgagattcccgagatcgaagaagcagagaatcctgctgcagaagttcgacgaagacggattcaaggaaagaaacctgaacgacacaagatacgtcaacagattcctgtgccagttcgtcgcagacagaatgagactgacaggaaagggaaagaagagagtcttcgcatcgaacggacagatcacaaacctgctgagaggattctggggactgagaaaggtcagagcagaaaacgacagacaccacgcactggacgcagtcgtcgtcgcatgctcgacagtcgcaatgcagcagaagatcacaagattcgtcagatacaaggaaatgaacgcattcgacggaaagacaatcgacaaggaaacaggagaagtcctgcaccagaagacacacttcccgcagccgtgggaattcttcgcacaggaagtcatgatcagagtcttcggaaagccggacggaaagccggaattcgaagaagcagacacactggaaaagctgagaacactgctggcagaaaagctgtcgtcgagaccggaagcagtccacgaatacgtcacaccgctgttcgtctcgagagcaccgaacagaaagatgtcgggacagggacacatggaaacagtcaagtcggcaaagagactggacgaaggagtctcggtcctgagagtcccgctgacacagctgaagctgaaggacctggaaaagatggtcaacagagaaagagaaccgaagctgtacgaagcactgaaggcaagactggaagcacacaaggacgacccggcaaaggcattcgcagaaccgttctacaagtacgacaaggcaggaaacagaacacagcaggtcaaggcagtcagagtcgaacaggtccagaagacaggagtctgggtcagaaaccacaacggaatcgcagacaacgcaacaatggtcagagtagacgtcttcgaaaagggagacaagtactacctggtcccgatctactcgtggcaggtcgcaaagggaatcctgccggacagagcagtcgtccagggaaaggacgaagaagactggcagctgatcgacgactcgttcaacttcaagttctcgctgcacccgaacgacctggtcgaagtcatcacaaagaaggcaagaatgttcggatacttcgcatcgtgccacagaggaacaggaaacatcaacatcagaatccacgacctggaccacaagatcggaaagaacggaatcctggaaggaatcggagtcaagacagcactgtcgttccagaagtaccagatcgacgaactgggaaaggaaatcagaccgtgcagactgaagaagagaccgccggtcagatccggaaagagaacagcagacggatcggaattcgaatcgccgaagaagaagagaaaggtcgaatga

SEQ ID NO: 99 - protein, 2552 aa, synthetic construct
  REGION 1..2552: note = Synthetic: Spy-R1335S Cas9-WT NmeCas9 fusion amino acid sequence
MDKKYSIGLDIGTNSVGWAVITDEYKVPSKKFKVLGNTDRHSIKKNLIGALLFDSGETAEATRLKRTARRRYTRRKNRICYLQEIFSNEMAKVDDSFFHRLEESFLVEEDKKHERHPIFGNIVDEVAYHEKYPTIYHLRKKLVDSTDKADLRLIYLALAHMIKFRGHFLIEGDLNPDNSDVDKLFIQLVQTYNQLFEENPINASGVDAKAILSARLSKSRRLENLIAQLPGEKKNGLFGNLIALSLGLTPNFKSNFDLAEDAKLQLSKDTYDDDLDNLLAQIGDQYADLFLAAKNLSDAILLSDILRVNTEITKAPLSASMIKRYDEHHQDLTLLKALVRQQLPEKYKEIFFDQSKNGYAGYIDGGASQEEFYKFIKPILEKMDGTEELLVKLNREDLLRKQRTFDNGSIPHQIHLGELHAILRRQEDFYPFLKDNREKIEKILTFRIPYYVGPLARGNSRFAWMTRKSEETITPWNFEEVVDKGASAQSFIERMTNFDKNLPNEKVLPKHSLLYEYFTVYNELTKVKYVTEGMRKPAFLSGEQKKAIVDLLFKTNRKVTVKQLKEDYFKKIECFDSVEISGVEDRFNASLGTYHDLLKIIKDKDFLDNEENEDILEDIVLTLTLFEDREMIEERLKTYAHLFDDKVMKQLKRRRYTGWGRLSRKLINGIRDKQSGKTILDFLKSDGFANRNFMQLIHDDSLTFKEDIQKAQVSGQGDSLHEHIANLAGSPAIKKGILQTVKVVDELVKVMGRHKPENIVIEMARENQTTQKGQKNSRERMKRIEEGIKELGSQILKEHPVENTQLQNEKLYLYYLQNGRDMYVDQELDINRLSDYDVDHIVPQSFLKDDSIDNKVLTRSDKNRGKSDNVPSEEVVKKMKNYWRQLLNAKLITQRKFDNLTKAERGGLSELDKAGFIKRQLVETRQITKHVAQILDSRMNTKYDENDKLIREVKVITLKSKLVSDFRKDFQFYKVREINNYHHAHDAYLNAVVGTALIKKYPKLESEFVYGDYKVYDVRKMIAKSEQEIGKATAKYFFYSNIMNFFKTEITLANGEIRKRPLIETNGETGEIVWDKGRDFATVRKVLSMPQVNIVKKTEVQTGGFSKESILPKRNSDKLIARKKDWDPKKYGGFDSPTVAYSVLVVAKVEKGKSKKLKSVKELLGITIMERSSFEKNPIDFLEAKGYKEVKKDLIIKLPKYSLFELENGRKRMLASAGELQKGNELALPSKYVNFLYLASHYEKLKGSPEDNEQKQLFVEQHKHYLDEIIEQISEFSKRVILADANLDKVLSAYNKHRDKPIREQAENIIHLFTLTNLGAPAAFKYFDTTIDRKSYTSTKEVLDATLIHQSITGLYETRIDLSQLGGDGAPESATESGGTSTESEGSAGTSTESEGSAGSAGSTSTEEGTSTESEGSAGTSTESEGSAGTSESATESGGTSTESEGSSSGAAFKPNSINYILGLDIGIASVGWAMVEIDEEENPIRLIDLGVRVFERAEVPKTGDSLAMARRLARSVRRLTRRRAHRLLRTRRLLKREGVLQAANFDENGLIKSLPNTPWQLRAAALDRKLTPLEWSAVLLHLIKHRGYLSQRKNEGETADKELGALLKGVAGNAHALQTGDFRTPAELALNKFEKESGHIRNQRSDYSHTFSRKDLQAELILLFEKQKEFGNPHVSGGLKEGIETLLMTQRPALSGDAVQKMLGHCTFEPAEPKAAKNTYTAERFIWLTKLNNLRILEQGSERPLTDTERATLMDEPYRKSKLTYAQARKLLGLEDTAFFKGLRYGKDNAEASTLMEMKAYHAISRALEKEGLKDKKSPLNLSPELQDEIGTAFSLFKTDEDITGRLKDRIQPEILEALLKHISFDKFVQISLKALRRIVPLMEQGKRYDEACAEIYGDHYGKKNTEEKIYLPPIPADEIRNPVVLRALSQARKVINGVVRRYGSPARIHIETAREVGKSFKDRKEIEKRQEENRKDREKAAAKFREYFPNFVGEPKSKDILKLRLYEQQHGKCLYSGKEINLGRLNEKGYVEIDHALPFSRTWDDSFNNKVLVLGSENQNKGNQTPYEYFNGKDNSREWQEFKARVETSRFPRSKKQRILLQKFDEDGFKERNLNDTRYVNRFLCQFVADRMRLTGKGKKRVFASNGQITNLLRGFWGLRKVRAENDRHHALDAVVVACSTVAMQQKITRFVRYKEMNAFDGKTIDKETGEVLHQKTHFPQPWEFFAQEVMIRVFGKPDGKPEFEEADTLEKLRTLLAEKLSSRPEAVHEYVTPLFVSRAPNRKMSGQGHMETVKSAKRLDEGVSVLRVPLTQLKLKDLEKMVNREREPKLYEALKARLEAHKDDPAKAFAEPFYKYDKAGNRTQQVKAVRVEQVQKTGVWVRNHNGIADNATMVRVDVFEKGDKYYLVPIYSWQVAKGILPDRAVVQGKDEEDWQLIDDSFNFKFSLHPNDLVEVITKKARMFGYFASCHRGTGNINIRIHDLDHKIGKNGILEGIGVKTALSFQKYQIDELGKEIRPCRLKKRPPVRSGKRTADGSEFESPKKKRKVE

SEQ ID NO: 100 - RNA, 7659 nt, synthetic construct
  misc_feature 1..7659: note = Synthetic: R1333K Spy-WT NmeCas9 fusion ORF
  source 1..7659: mol_type = other RNA
atggacaagaagtacagcatcggactggacatcggaacaaacagcgtcggatgggcagtcatcacagacgaatacaaggtcccgagcaagaagttcaaggtcctgggaaacacagacagacacagcatcaagaagaacctgatcggagcactgctgttcgacagcggagaaacagcagaagcaacaagactgaagagaacagcaagaagaagatacacaagaagaaagaacagaatctgctacctgcaggaaatcttcagcaacgaaatggcaaaggtcgacgacagcttcttccacagactggaagaaagcttcctggtcgaagaagacaagaagcacgaaagacacccgatcttcggaaacatcgtcgacgaagtcgcataccacgaaaagtacccgacaatctaccacctgagaaagaagctggtcgacagcacagacaaggcagacctgagactgatctacctggcactggcacacatgatcaagttcagaggacacttcctgatcgaaggagacctgaacccggacaacagcgacgtcgacaagctgttcatccagctggtccagacatacaaccagctgttcgaagaaaacccgatcaacgcaagcggagtcgacgcaaaggcaatcctgagcgcaagactgagcaagagcagaagactggaaaacctgatcgcacagctgccgggagaaaagaagaacggactgttcggaaacctgatcgcactgagcctgggactgacaccgaacttcaagagcaacttcgacctggcagaagacgcaaagctgcagctgagcaaggacacatacgacgacgacctggacaacctgctggcacagatcggagaccagtacgcagacctgttcctggcagcaaagaacctgagcgacgcaatcctgctgagcgacatcctgagagtcaacacagaaatcacaaaggcaccgctgagcgcaagcatgatcaagagatacgacgaacaccaccaggacctgacactgctgaaggcactggtcagacagcagctgccggaaaagtacaaggaaatcttcttcgaccagagcaagaacggatacgcaggatacatcgacggaggagcaagccaggaagaattctacaagttcatcaagccgatcctggaaaagatggacggaacagaagaactgctggtcaagctgaacagagaagacctgctgagaaagcagagaacattcgacaacggaagcatcccgcaccagatccacctgggagaactgcacgcaatcctgagaagacaggaagacttctacccgttcctgaaggacaacagagaaaagatcgaaaagatcctgacattcagaatcccgtactacgtcggaccgctggcaagaggaaacagcagattcgcatggatgacaagaaagagcgaagaaacaatcacaccgtggaacttcgaagaagtcgtcgacaagggagcaagcgcacagagcttcatcgaaagaatgacaaacttcgacaagaacctgccgaacgaaaaggtcctgccgaagcacagcctgctgtacgaatacttcacagtctacaacgaactgacaaaggtcaagtacgtcacagaaggaatgagaaagccggcattcctgagcggagaacagaagaaggcaatcgtcgacctgctgttcaagacaaacagaaaggtcacagtcaagcagctgaaggaagactacttcaagaagatcgaatgcttcgacagcgtcgaaatcagcggagtcgaagacagattcaacgcaagcctgggaacataccacgacctgctgaagatcatcaaggacaaggacttcctggacaacgaagaaaacgaagacatcctggaagacatcgtcctgacactgacactgttcgaagacagagaaatgatcgaagaaagactgaagacatacgcacacctgttcgacgacaaggtcatgaagcagctgaagagaagaagatacacaggatggggaagactgagcagaaagctgatcaacggaatcagagacaagcagagcggaaagacaatcctggacttcctgaagagcgacggattcgcaaacagaaacttcatgcagctgatccacgacgacagcctgacattcaaggaagacatccagaaggcacaggtcagcggacagggagacagcctgcacgaacacatcgcaaacctggcaggaagcccggcaatcaagaagggaatcctgcagacagtcaaggtcgtcgacgaactggtcaaggtcatgggaagacacaagccggaaaacatcgtcatcgaaatggcaagagaaaaccagacaacacagaagggacagaagaacagcagagaaagaatgaagagaatcgaagaaggaatcaaggaactgggaagccagatcctgaaggaacacccggtcgaaaacacacagctgcagaacgaaaagctgtacctgtactacctgcagaacggaagagacatgtacgtcgaccaggaactggacatcaacagactgagcgactacgacgtcgaccacatcgtcccgcagagcttcctgaaggacgacagcatcgacaacaaggtcctgacaagaagcgacaagaacagaggaaagagcgacaacgtcccgagcgaagaagtcgtcaagaagatgaagaactactggagacagctgctgaacgcaaagctgatcacacagagaaagttcgacaacctgacaaaggcagagagaggaggactgagcgaactggacaaggcaggattcatcaagagacagctggtcgaaacaagacagatcacaaagcacgtcgcacagatcctggacagcagaatgaacacaaagtacgacgaaaacgacaagctgatcagagaagtcaaggtcatcacactgaagagcaagctggtcagcgacttcagaaaggacttccagttctacaaggtcagagaaatcaacaactaccaccacgcacacgacgcatacctgaacgcagtcgtcggaacagcactgatcaagaagtacccgaagctggaaagcgaattcgtctacggagactacaaggtctacgacgtcagaaagatgatcgcaaagagcgaacaggaaatcggaaaggcaacagcaaagtacttcttctacagcaacatcatgaacttcttcaagacagaaatcacactggcaaacggagaaatcagaaagagaccgctgatcgaaacaaacggagaaacaggagaaatcgtctgggacaagggaagagacttcgcaacagtcagaaaggtcctgagcatgccgcaggtcaacatcgtcaagaagacagaagtccagacaggaggattcagcaaggaaagcatcctgccgaagagaaacagcgacaagctgatcgcaagaaagaaggactgggacccgaagaagtacggaggattcgacagcccgacagtcgcatacagcgtcctggtcgtcgcaaaggtcgaaaagggaaagagcaagaagctgaagagcgtcaaggaactgctgggaatcacaatcatggaaagaagcagcttcgaaaagaacccgatcgacttcctggaagcaaagggatacaaggaagtcaagaaggacctgatcatcaagctgccgaagtacagcctgttcgaactggaaaacggaagaaagagaatgctggcaagcgcaggagaactgcagaagggaaacgaactggcactgccgagcaagtacgtcaacttcctgtacctggcaagccactacgaaaagctgaagggaagcccggaagacaacgaacagaagcagctgttcgtcgaacagcacaagcactacctggacgaaatcatcgaacagatcagcgaattcagcaagagagtcatcctggcagacgcaaacctggacaaggtcctgagcgcatacaacaagcacagagacaagccgatcagagaacaggcagaaaacatcatccacctgttcacactgacaaacctgggagcaccggcagcattcaagtacttcgacacaacaatcgacaagaagagatacacaagcacaaaggaagtcctggacgcaacactgatccaccagagcatcacaggactgtacgaaacaagaatcgacctgagccagctgggaggagacggcgcgcctgagtctgctacagaaagtgggggaacctccacagagtctgaaggaagtgccggcacttcaaccgagagcgaagggtccgctggatctgcaggctccacatctactgaggaaggcaccagtacagagtcagaaggcagcgccggaacttccaccgagtctgaaggcagtgccgggacaagtgaatcagctactgaaagcggcgggacatcaactgagagcgaaggatccagttccggagcagcattcaagccgaactcgatcaactacatcctgggactggacatcggaatcgcatcggtcggatgggcaatggtcgaaatcgacgaagaagaaaacccgatcagactgatcgacctgggagtcagagtcttcgaaagagcagaagtcccgaagacaggagactcgctggcaatggcaagaagactggcaagatcggtcagaagactgacaagaagaagagcacacagactgctgagaacaagaagactgctgaagagagaaggagtcctgcaggcagcaaacttcgacgaaaacggactgatcaagtcgctgccgaacacaccgtggcagctgagagcagcagcactggacagaaagctgacaccgctggaatggtcggcagtcctgctgcacctgatcaagcacagaggatacctgtcgcagagaaagaacgaaggagaaacagcagacaaggaactgggagcactgctgaagggagtcgcaggaaacgcacacgcactgcagacaggagacttcagaacaccggcagaactggcactgaacaagttcgaaaaggaatcgggacacatcagaaaccagagatcggactactcgcacacattctcgagaaaggacctgcaggcagaactgatcctgctgttcgaaaagcagaaggaattcggaaacccgcacgtctcgggaggactgaaggaaggaatcgaaacactgctgatgacacagagaccggcactgtcgggagacgcagtccagaagatgctgggacactgcacattcgaaccggcagaaccgaaggcagcaaagaacacatacacagcagaaagattcatctggctgacaaagctgaacaacctgagaatcctggaacagggatcggaaagaccgctgacagacacagaaagagcaacactgatggacgaaccgtacagaaagtcgaagctgacatacgcacaggcaagaaagctgctgggactggaagacacagcattcttcaagggactgagatacggaaaggacaacgcagaagcatcgacactgatggaaatgaaggcataccacgcaatctcgagagcactggaaaaggaaggactgaaggacaagaagtcgccgctgaacctgtcgccggaactgcaggacgaaatcggaacagcattctcgctgttcaagacagacgaagacatcacaggaagactgaaggacagaatccagccggaaatcctggaagcactgctgaagcacatctcgttcgacaagttcgtccagatctcgctgaaggcactgagaagaatcgtcccgctgatggaacagggaaagagatacgacgaagcatgcgcagaaatctacggagaccactacggaaagaagaacacagaagaaaagatctacctgccgccgatcccggcagacgaaatcagaaacccggtcgtcctgagagcactgtcgcaggcaagaaaggtcatcaacggagtcgtcagaagatacggatcgccggcaagaatccacatcgaaacagcaagagaagtcggaaagtcgttcaaggacagaaaggaaatcgaaaagagacaggaagaaaacagaaaggacagagaaaaggcagcagcaaagttcagagaatacttcccgaacttcgtcggagaaccgaagtcgaaggacatcctgaagctgagactgtacgaacagcagcacggaaagtgcctgtactcgggaaaggaaatcaacctgggaagactgaacgaaaagggatacgtcgaaatcgaccacgcactgccgttctcgagaacatgggacgactcgttcaacaacaaggtcctggtcctgggatcggaaaaccagaacaagggaaaccagacaccgtacgaatacttcaacggaaaggacaactcgagagaatggcaggaattcaaggcaagagtcgaaacatcgagattcccgagatcgaagaagcagagaatcctgctgcagaagttcgacgaagacggattcaaggaaagaaacctgaacgacacaagatacgtcaacagattcctgtgccagttcgtcgcagacagaatgagactgacaggaaagggaaagaagagagtcttcgcatcgaacggacagatcacaaacctgctgagaggattctggggactgagaaaggtcagagcagaaaacgacagacaccacgcactggacgcagtcgtcgtcgcatgctcgacagtcgcaatgcagcagaagatcacaagattcgtcagatacaaggaaatgaacgcattcgacggaaagacaatcgacaaggaaacaggagaagtcctgcaccagaagacacacttcccgcagccgtgggaattcttcgcacaggaagtcatgatcagagtcttcggaaagccggacggaaagccggaattcgaagaagcagacacactggaaaagctgagaacactgctggcagaaaagctgtcgtcgagaccggaagcagtccacgaatacgtcacaccgctgttcgtctcgagagcaccgaacagaaagatgtcgggacagggacacatggaaacagtcaagtcggcaaagagactggacgaaggagtctcggtcctgagagtcccgctgacacagctgaagctgaaggacctggaaaagatggtcaacagagaaagagaaccgaagctgtacgaagcactgaaggcaagactggaagcacacaaggacgacccggcaaaggcattcgcagaaccgttctacaagtacgacaaggcaggaaacagaacacagcaggtcaaggcagtcagagtcgaacaggtccagaagacaggagtctgggtcagaaaccacaacggaatcgcagacaacgcaacaatggtcagagtagacgtcttcgaaaagggagacaagtactacctggtcccgatctactcgtggcaggtcgcaaagggaatcctgccggacagagcagtcgtccagggaaaggacgaagaagactggcagctgatcgacgactcgttcaacttcaagttctcgctgcacccgaacgacctggtcgaagtcatcacaaagaaggcaagaatgttcggatacttcgcatcgtgccacagaggaacaggaaacatcaacatcagaatccacgacctggaccacaagatcggaaagaacggaatcctggaaggaatcggagtcaagacagcactgtcgttccagaagtaccagatcgacgaactgggaaaggaaatcagaccgtgcagactgaagaagagaccgccggtcagatccggaaagagaacagcagacggatcggaattcgaatcgccgaagaagaagagaaaggtcgaatga

SEQ ID NO: 101 - protein, 2552 aa, synthetic construct
  REGION 1..2552: note = Synthetic: R1333K Spy -WT NmeCas9 fusion amino acid sequence
MDKKYSIGLDIGTNSVGWAVITDEYKVPSKKFKVLGNTDRHSIKKNLIGALLFDSGETAEATRLKRTARRRYTRRKNRICYLQEIFSNEMAKVDDSFFHRLEESFLVEEDKKHERHPIFGNIVDEVAYHEKYPTIYHLRKKLVDSTDKADLRLIYLALAHMIKFRGHFLIEGDLNPDNSDVDKLFIQLVQTYNQLFEENPINASGVDAKAILSARLSKSRRLENLIAQLPGEKKNGLFGNLIALSLGLTPNFKSNFDLAEDAKLQLSKDTYDDDLDNLLAQIGDQYADLFLAAKNLSDAILLSDILRVNTEITKAPLSASMIKRYDEHHQDLTLLKALVRQQLPEKYKEIFFDQSKNGYAGYIDGGASQEEFYKFIKPILEKMDGTEELLVKLNREDLLRKQRTFDNGSIPHQIHLGELHAILRRQEDFYPFLKDNREKIEKILTFRIPYYVGPLARGNSRFAWMTRKSEETITPWNFEEVVDKGASAQSFIERMTNFDKNLPNEKVLPKHSLLYEYFTVYNELTKVKYVTEGMRKPAFLSGEQKKAIVDLLFKTNRKVTVKQLKEDYFKKIECFDSVEISGVEDRFNASLGTYHDLLKIIKDKDFLDNEENEDILEDIVLTLTLFEDREMIEERLKTYAHLFDDKVMKQLKRRRYTGWGRLSRKLINGIRDKQSGKTILDFLKSDGFANRNFMQLIHDDSLTFKEDIQKAQVSGQGDSLHEHIANLAGSPAIKKGILQTVKVVDELVKVMGRHKPENIVIEMARENQTTQKGQKNSRERMKRIEEGIKELGSQILKEHPVENTQLQNEKLYLYYLQNGRDMYVDQELDINRLSDYDVDHIVPQSFLKDDSIDNKVLTRSDKNRGKSDNVPSEEVVKKMKNYWRQLLNAKLITQRKFDNLTKAERGGLSELDKAGFIKRQLVETRQITKHVAQILDSRMNTKYDENDKLIREVKVITLKSKLVSDFRKDFQFYKVREINNYHHAHDAYLNAVVGTALIKKYPKLESEFVYGDYKVYDVRKMIAKSEQEIGKATAKYFFYSNIMNFFKTEITLANGEIRKRPLIETNGETGEIVWDKGRDFATVRKVLSMPQVNIVKKTEVQTGGFSKESILPKRNSDKLIARKKDWDPKKYGGFDSPTVAYSVLVVAKVEKGKSKKLKSVKELLGITIMERSSFEKNPIDFLEAKGYKEVKKDLIIKLPKYSLFELENGRKRMLASAGELQKGNELALPSKYVNFLYLASHYEKLKGSPEDNEQKQLFVEQHKHYLDEIIEQISEFSKRVILADANLDKVLSAYNKHRDKPIREQAENIIHLFTLTNLGAPAAFKYFDTTIDKKRYTSTKEVLDATLIHQSITGLYETRIDLSQLGGDGAPESATESGGTSTESEGSAGTSTESEGSAGSAGSTSTEEGTSTESEGSAGTSTESEGSAGTSESATESGGTSTESEGSSSGAAFKPNSINYILGLDIGIASVGWAMVEIDEEENPIRLIDLGVRVFERAEVPKTGDSLAMARRLARSVRRLTRRRAHRLLRTRRLLKREGVLQAANFDENGLIKSLPNTPWQLRAAALDRKLTPLEWSAVLLHLIKHRGYLSQRKNEGETADKELGALLKGVAGNAHALQTGDFRTPAELALNKFEKESGHIRNQRSDYSHTFSRKDLQAELILLFEKQKEFGNPHVSGGLKEGIETLLMTQRPALSGDAVQKMLGHCTFEPAEPKAAKNTYTAERFIWLTKLNNLRILEQGSERPLTDTERATLMDEPYRKSKLTYAQARKLLGLEDTAFFKGLRYGKDNAEASTLMEMKAYHAISRALEKEGLKDKKSPLNLSPELQDEIGTAFSLFKTDEDITGRLKDRIQPEILEALLKHISFDKFVQISLKALRRIVPLMEQGKRYDEACAEIYGDHYGKKNTEEKIYLPPIPADEIRNPVVLRALSQARKVINGVVRRYGSPARIHIETAREVGKSFKDRKEIEKRQEENRKDREKAAAKFREYFPNFVGEPKSKDILKLRLYEQQHGKCLYSGKEINLGRLNEKGYVEIDHALPFSRTWDDSFNNKVLVLGSENQNKGNQTPYEYFNGKDNSREWQEFKARVETSRFPRSKKQRILLQKFDEDGFKERNLNDTRYVNRFLCQFVADRMRLTGKGKKRVFASNGQITNLLRGFWGLRKVRAENDRHHALDAVVVACSTVAMQQKITRFVRYKEMNAFDGKTIDKETGEVLHQKTHFPQPWEFFAQEVMIRVFGKPDGKPEFEEADTLEKLRTLLAEKLSSRPEAVHEYVTPLFVSRAPNRKMSGQGHMETVKSAKRLDEGVSVLRVPLTQLKLKDLEKMVNREREPKLYEALKARLEAHKDDPAKAFAEPFYKYDKAGNRTQQVKAVRVEQVQKTGVWVRNHNGIADNATMVRVDVFEKGDKYYLVPIYSWQVAKGILPDRAVVQGKDEEDWQLIDDSFNFKFSLHPNDLVEVITKKARMFGYFASCHRGTGNINIRIHDLDHKIGKNGILEGIGVKTALSFQKYQIDELGKEIRPCRLKKRPPVRSGKRTADGSEFESPKKKRKVE

SEQ ID NO: 102 - RNA, 7659 nt, synthetic construct
  misc_feature 1..7659: note = Synthetic: WT SpyCas9 -WT NmeCas9 fusion ORF
  source 1..7659: mol_type = other RNA
atggacaagaagtacagcatcggactggacatcggaacaaacagcgtcggatgggcagtcatcacagacgaatacaaggtcccgagcaagaagttcaaggtcctgggaaacacagacagacacagcatcaagaagaacctgatcggagcactgctgttcgacagcggagaaacagcagaagcaacaagactgaagagaacagcaagaagaagatacacaagaagaaagaacagaatctgctacctgcaggaaatcttcagcaacgaaatggcaaaggtcgacgacagcttcttccacagactggaagaaagcttcctggtcgaagaagacaagaagcacgaaagacacccgatcttcggaaacatcgtcgacgaagtcgcataccacgaaaagtacccgacaatctaccacctgagaaagaagctggtcgacagcacagacaaggcagacctgagactgatctacctggcactggcacacatgatcaagttcagaggacacttcctgatcgaaggagacctgaacccggacaacagcgacgtcgacaagctgttcatccagctggtccagacatacaaccagctgttcgaagaaaacccgatcaacgcaagcggagtcgacgcaaaggcaatcctgagcgcaagactgagcaagagcagaagactggaaaacctgatcgcacagctgccgggagaaaagaagaacggactgttcggaaacctgatcgcactgagcctgggactgacaccgaacttcaagagcaacttcgacctggcagaagacgcaaagctgcagctgagcaaggacacatacgacgacgacctggacaacctgctggcacagatcggagaccagtacgcagacctgttcctggcagcaaagaacctgagcgacgcaatcctgctgagcgacatcctgagagtcaacacagaaatcacaaaggcaccgctgagcgcaagcatgatcaagagatacgacgaacaccaccaggacctgacactgctgaaggcactggtcagacagcagctgccggaaaagtacaaggaaatcttcttcgaccagagcaagaacggatacgcaggatacatcgacggaggagcaagccaggaagaattctacaagttcatcaagccgatcctggaaaagatggacggaacagaagaactgctggtcaagctgaacagagaagacctgctgagaaagcagagaacattcgacaacggaagcatcccgcaccagatccacctgggagaactgcacgcaatcctgagaagacaggaagacttctacccgttcctgaaggacaacagagaaaagatcgaaaagatcctgacattcagaatcccgtactacgtcggaccgctggcaagaggaaacagcagattcgcatggatgacaagaaagagcgaagaaacaatcacaccgtggaacttcgaagaagtcgtcgacaagggagcaagcgcacagagcttcatcgaaagaatgacaaacttcgacaagaacctgccgaacgaaaaggtcctgccgaagcacagcctgctgtacgaatacttcacagtctacaacgaactgacaaaggtcaagtacgtcacagaaggaatgagaaagccggcattcctgagcggagaacagaagaaggcaatcgtcgacctgctgttcaagacaaacagaaaggtcacagtcaagcagctgaaggaagactacttcaagaagatcgaatgcttcgacagcgtcgaaatcagcggagtcgaagacagattcaacgcaagcctgggaacataccacgacctgctgaagatcatcaaggacaaggacttcctggacaacgaagaaaacgaagacatcctggaagacatcgtcctgacactgacactgttcgaagacagagaaatgatcgaagaaagactgaagacatacgcacacctgttcgacgacaaggtcatgaagcagctgaagagaagaagatacacaggatggggaagactgagcagaaagctgatcaacggaatcagagacaagcagagcggaaagacaatcctggacttcctgaagagcgacggattcgcaaacagaaacttcatgcagctgatccacgacgacagcctgacattcaaggaagacatccagaaggcacaggtcagcggacagggagacagcctgcacgaacacatcgcaaacctggcaggaagcccggcaatcaagaagggaatcctgcagacagtcaaggtcgtcgacgaactggtcaaggtcatgggaagacacaagccggaaaacatcgtcatcgaaatggcaagagaaaaccagacaacacagaagggacagaagaacagcagagaaagaatgaagagaatcgaagaaggaatcaaggaactgggaagccagatcctgaaggaacacccggtcgaaaacacacagctgcagaacgaaaagctgtacctgtactacctgcagaacggaagagacatgtacgtcgaccaggaactggacatcaacagactgagcgactacgacgtcgaccacatcgtcccgcagagcttcctgaaggacgacagcatcgacaacaaggtcctgacaagaagcgacaagaacagaggaaagagcgacaacgtcccgagcgaagaagtcgtcaagaagatgaagaactactggagacagctgctgaacgcaaagctgatcacacagagaaagttcgacaacctgacaaaggcagagagaggaggactgagcgaactggacaaggcaggattcatcaagagacagctggtcgaaacaagacagatcacaaagcacgtcgcacagatcctggacagcagaatgaacacaaagtacgacgaaaacgacaagctgatcagagaagtcaaggtcatcacactgaagagcaagctggtcagcgacttcagaaaggacttccagttctacaaggtcagagaaatcaacaactaccaccacgcacacgacgcatacctgaacgcagtcgtcggaacagcactgatcaagaagtacccgaagctggaaagcgaattcgtctacggagactacaaggtctacgacgtcagaaagatgatcgcaaagagcgaacaggaaatcggaaaggcaacagcaaagtacttcttctacagcaacatcatgaacttcttcaagacagaaatcacactggcaaacggagaaatcagaaagagaccgctgatcgaaacaaacggagaaacaggagaaatcgtctgggacaagggaagagacttcgcaacagtcagaaaggtcctgagcatgccgcaggtcaacatcgtcaagaagacagaagtccagacaggaggattcagcaaggaaagcatcctgccgaagagaaacagcgacaagctgatcgcaagaaagaaggactgggacccgaagaagtacggaggattcgacagcccgacagtcgcatacagcgtcctggtcgtcgcaaaggtcgaaaagggaaagagcaagaagctgaagagcgtcaaggaactgctgggaatcacaatcatggaaagaagcagcttcgaaaagaacccgatcgacttcctggaagcaaagggatacaaggaagtcaagaaggacctgatcatcaagctgccgaagtacagcctgttcgaactggaaaacggaagaaagagaatgctggcaagcgcaggagaactgcagaagggaaacgaactggcactgccgagcaagtacgtcaacttcctgtacctggcaagccactacgaaaagctgaagggaagcccggaagacaacgaacagaagcagctgttcgtcgaacagcacaagcactacctggacgaaatcatcgaacagatcagcgaattcagcaagagagtcatcctggcagacgcaaacctggacaaggtcctgagcgcatacaacaagcacagagacaagccgatcagagaacaggcagaaaacatcatccacctgttcacactgacaaacctgggagcaccggcagcattcaagtacttcgacacaacaatcgacagaaagagatacacaagcacaaaggaagtcctggacgcaacactgatccaccagagcatcacaggactgtacgaaacaagaatcgacctgagccagctgggaggagacggcgcgcctgagtctgctacagaaagtgggggaacctccacagagtctgaaggaagtgccggcacttcaaccgagagcgaagggtccgctggatctgcaggctccacatctactgaggaaggcaccagtacagagtcagaaggcagcgccggaacttccaccgagtctgaaggcagtgccgggacaagtgaatcagctactgaaagcggcgggacatcaactgagagcgaaggatccagttccggagcagcattcaagccgaactcgatcaactacatcctgggactggacatcggaatcgcatcggtcggatgggcaatggtcgaaatcgacgaagaagaaaacccgatcagactgatcgacctgggagtcagagtcttcgaaagagcagaagtcccgaagacaggagactcgctggcaatggcaagaagactggcaagatcggtcagaagactgacaagaagaagagcacacagactgctgagaacaagaagactgctgaagagagaaggagtcctgcaggcagcaaacttcgacgaaaacggactgatcaagtcgctgccgaacacaccgtggcagctgagagcagcagcactggacagaaagctgacaccgctggaatggtcggcagtcctgctgcacctgatcaagcacagaggatacctgtcgcagagaaagaacgaaggagaaacagcagacaaggaactgggagcactgctgaagggagtcgcaggaaacgcacacgcactgcagacaggagacttcagaacaccggcagaactggcactgaacaagttcgaaaaggaatcgggacacatcagaaaccagagatcggactactcgcacacattctcgagaaaggacctgcaggcagaactgatcctgctgttcgaaaagcagaaggaattcggaaacccgcacgtctcgggaggactgaaggaaggaatcgaaacactgctgatgacacagagaccggcactgtcgggagacgcagtccagaagatgctgggacactgcacattcgaaccggcagaaccgaaggcagcaaagaacacatacacagcagaaagattcatctggctgacaaagctgaacaacctgagaatcctggaacagggatcggaaagaccgctgacagacacagaaagagcaacactgatggacgaaccgtacagaaagtcgaagctgacatacgcacaggcaagaaagctgctgggactggaagacacagcattcttcaagggactgagatacggaaaggacaacgcagaagcatcgacactgatggaaatgaaggcataccacgcaatctcgagagcactggaaaaggaaggactgaaggacaagaagtcgccgctgaacctgtcgccggaactgcaggacgaaatcggaacagcattctcgctgttcaagacagacgaagacatcacaggaagactgaaggacagaatccagccggaaatcctggaagcactgctgaagcacatctcgttcgacaagttcgtccagatctcgctgaaggcactgagaagaatcgtcccgctgatggaacagggaaagagatacgacgaagcatgcgcagaaatctacggagaccactacggaaagaagaacacagaagaaaagatctacctgccgccgatcccggcagacgaaatcagaaacccggtcgtcctgagagcactgtcgcaggcaagaaaggtcatcaacggagtcgtcagaagatacggatcgccggcaagaatccacatcgaaacagcaagagaagtcggaaagtcgttcaaggacagaaaggaaatcgaaaagagacaggaagaaaacagaaaggacagagaaaaggcagcagcaaagttcagagaatacttcccgaacttcgtcggagaaccgaagtcgaaggacatcctgaagctgagactgtacgaacagcagcacggaaagtgcctgtactcgggaaaggaaatcaacctgggaagactgaacgaaaagggatacgtcgaaatcgaccacgcactgccgttctcgagaacatgggacgactcgttcaacaacaaggtcctggtcctgggatcggaaaaccagaacaagggaaaccagacaccgtacgaatacttcaacggaaaggacaactcgagagaatggcaggaattcaaggcaagagtcgaaacatcgagattcccgagatcgaagaagcagagaatcctgctgcagaagttcgacgaagacggattcaaggaaagaaacctgaacgacacaagatacgtcaacagattcctgtgccagttcgtcgcagacagaatgagactgacaggaaagggaaagaagagagtcttcgcatcgaacggacagatcacaaacctgctgagaggattctggggactgagaaaggtcagagcagaaaacgacagacaccacgcactggacgcagtcgtcgtcgcatgctcgacagtcgcaatgcagcagaagatcacaagattcgtcagatacaaggaaatgaacgcattcgacggaaagacaatcgacaaggaaacaggagaagtcctgcaccagaagacacacttcccgcagccgtgggaattcttcgcacaggaagtcatgatcagagtcttcggaaagccggacggaaagccggaattcgaagaagcagacacactggaaaagctgagaacactgctggcagaaaagctgtcgtcgagaccggaagcagtccacgaatacgtcacaccgctgttcgtctcgagagcaccgaacagaaagatgtcgggacagggacacatggaaacagtcaagtcggcaaagagactggacgaaggagtctcggtcctgagagtcccgctgacacagctgaagctgaaggacctggaaaagatggtcaacagagaaagagaaccgaagctgtacgaagcactgaaggcaagactggaagcacacaaggacgacccggcaaaggcattcgcagaaccgttctacaagtacgacaaggcaggaaacagaacacagcaggtcaaggcagtcagagtcgaacaggtccagaagacaggagtctgggtcagaaaccacaacggaatcgcagacaacgcaacaatggtcagagtagacgtcttcgaaaagggagacaagtactacctggtcccgatctactcgtggcaggtcgcaaagggaatcctgccggacagagcagtcgtccagggaaaggacgaagaagactggcagctgatcgacgactcgttcaacttcaagttctcgctgcacccgaacgacctggtcgaagtcatcacaaagaaggcaagaatgttcggatacttcgcatcgtgccacagaggaacaggaaacatcaacatcagaatccacgacctggaccacaagatcggaaagaacggaatcctggaaggaatcggagtcaagacagcactgtcgttccagaagtaccagatcgacgaactgggaaaggaaatcagaccgtgcagactgaagaagagaccgccggtcagatccggaaagagaacagcagacggatcggaattcgaatcgccgaagaagaagagaaaggtcgaatga

SEQ ID NO: 103 - protein, 2552 aa, synthetic construct
  REGION 1..2552: note = Synthetic: WT SpyCas9-WT NmeCas9 fusion ORF
MDKKYSIGLDIGTNSVGWAVITDEYKVPSKKFKVLGNTDRHSIKKNLIGALLFDSGETAEATRLKRTARRRYTRRKNRICYLQEIFSNEMAKVDDSFFHRLEESFLVEEDKKHERHPIFGNIVDEVAYHEKYPTIYHLRKKLVDSTDKADLRLIYLALAHMIKFRGHFLIEGDLNPDNSDVDKLFIQLVQTYNQLFEENPINASGVDAKAILSARLSKSRRLENLIAQLPGEKKNGLFGNLIALSLGLTPNFKSNFDLAEDAKLQLSKDTYDDDLDNLLAQIGDQYADLFLAAKNLSDAILLSDILRVNTEITKAPLSASMIKRYDEHHQDLTLLKALVRQQLPEKYKEIFFDQSKNGYAGYIDGGASQEEFYKFIKPILEKMDGTEELLVKLNREDLLRKQRTFDNGSIPHQIHLGELHAILRRQEDFYPFLKDNREKIEKILTFRIPYYVGPLARGNSRFAWMTRKSEETITPWNFEEVVDKGASAQSFIERMTNFDKNLPNEKVLPKHSLLYEYFTVYNELTKVKYVTEGMRKPAFLSGEQKKAIVDLLFKTNRKVTVKQLKEDYFKKIECFDSVEISGVEDRFNASLGTYHDLLKIIKDKDFLDNEENEDILEDIVLTLTLFEDREMIEERLKTYAHLFDDKVMKQLKRRRYTGWGRLSRKLINGIRDKQSGKTILDFLKSDGFANRNFMQLIHDDSLTFKEDIQKAQVSGQGDSLHEHIANLAGSPAIKKGILQTVKVVDELVKVMGRHKPENIVIEMARENQTTQKGQKNSRERMKRIEEGIKELGSQILKEHPVENTQLQNEKLYLYYLQNGRDMYVDQELDINRLSDYDVDHIVPQSFLKDDSIDNKVLTRSDKNRGKSDNVPSEEVVKKMKNYWRQLLNAKLITQRKFDNLTKAERGGLSELDKAGFIKRQLVETRQITKHVAQILDSRMNTKYDENDKLIREVKVITLKSKLVSDFRKDFQFYKVREINNYHHAHDAYLNAVVGTALIKKYPKLESEFVYGDYKVYDVRKMIAKSEQEIGKATAKYFFYSNIMNFFKTEITLANGEIRKRPLIETNGETGEIVWDKGRDFATVRKVLSMPQVNIVKKTEVQTGGFSKESILPKRNSDKLIARKKDWDPKKYGGFDSPTVAYSVLVVAKVEKGKSKKLKSVKELLGITIMERSSFEKNPIDFLEAKGYKEVKKDLIIKLPKYSLFELENGRKRMLASAGELQKGNELALPSKYVNFLYLASHYEKLKGSPEDNEQKQLFVEQHKHYLDEIIEQISEFSKRVILADANLDKVLSAYNKHRDKPIREQAENIIHLFTLTNLGAPAAFKYFDTTIDRKRYTSTKEVLDATLIHQSITGLYETRIDLSQLGGDGAPESATESGGTSTESEGSAGTSTESEGSAGSAGSTSTEEGTSTESEGSAGTSTESEGSAGTSESATESGGTSTESEGSSSGAAFKPNSINYILGLDIGIASVGWAMVEIDEEENPIRLIDLGVRVFERAEVPKTGDSLAMARRLARSVRRLTRRRAHRLLRTRRLLKREGVLQAANFDENGLIKSLPNTPWQLRAAALDRKLTPLEWSAVLLHLIKHRGYLSQRKNEGETADKELGALLKGVAGNAHALQTGDFRTPAELALNKFEKESGHIRNQRSDYSHTFSRKDLQAELILLFEKQKEFGNPHVSGGLKEGIETLLMTQRPALSGDAVQKMLGHCTFEPAEPKAAKNTYTAERFIWLTKLNNLRILEQGSERPLTDTERATLMDEPYRKSKLTYAQARKLLGLEDTAFFKGLRYGKDNAEASTLMEMKAYHAISRALEKEGLKDKKSPLNLSPELQDEIGTAFSLFKTDEDITGRLKDRIQPEILEALLKHISFDKFVQISLKALRRIVPLMEQGKRYDEACAEIYGDHYGKKNTEEKIYLPPIPADEIRNPVVLRALSQARKVINGVVRRYGSPARIHIETAREVGKSFKDRKEIEKRQEENRKDREKAAAKFREYFPNFVGEPKSKDILKLRLYEQQHGKCLYSGKEINLGRLNEKGYVEIDHALPFSRTWDDSFNNKVLVLGSENQNKGNQTPYEYFNGKDNSREWQEFKARVETSRFPRSKKQRILLQKFDEDGFKERNLNDTRYVNRFLCQFVADRMRLTGKGKKRVFASNGQITNLLRGFWGLRKVRAENDRHHALDAVVVACSTVAMQQKITRFVRYKEMNAFDGKTIDKETGEVLHQKTHFPQPWEFFAQEVMIRVFGKPDGKPEFEEADTLEKLRTLLAEKLSSRPEAVHEYVTPLFVSRAPNRKMSGQGHMETVKSAKRLDEGVSVLRVPLTQLKLKDLEKMVNREREPKLYEALKARLEAHKDDPAKAFAEPFYKYDKAGNRTQQVKAVRVEQVQKTGVWVRNHNGIADNATMVRVDVFEKGDKYYLVPIYSWQVAKGILPDRAVVQGKDEEDWQLIDDSFNFKFSLHPNDLVEVITKKARMFGYFASCHRGTGNINIRIHDLDHKIGKNGILEGIGVKTALSFQKYQIDELGKEIRPCRLKKRPPVRSGKRTADGSEFESPKKKRKVE

SEQ ID NO: 104 - RNA, 4104 nt, synthetic construct
  misc_feature 1..4104: note = Synthetic: Spy Cas9 R133K nucleic acid coding sequence without start or stop codons suitable for fusion constructs
  source 1..4104: mol_type = other RNA
ggcgacaagaagtactccatcggcctggacatcggcaccaactccgtgggctgggccgtgatcaccgacgagtacaaggtgccctccaagaagttcaaggtgctgggcaacaccgaccggcactccatcaagaagaacctgatcggcgccctgctgttcgactccggcgagaccgccgaggccacccggctgaagcggaccgcccggcggcggtacacccggcggaagaaccggatctgctacctgcaggagatcttctccaacgagatggccaaggtggacgactccttcttccaccggctggaggagtccttcctggtggaggaggacaagaagcacgagcggcaccccatcttcggcaacatcgtggacgaggtggcctaccacgagaagtaccccaccatctaccacctgcggaagaagctggtggactccaccgacaaggccgacctgcggctgatctacctggccctggcccacatgatcaagttccggggccacttcctgatcgagggcgacctgaaccccgacaactccgacgtggacaagctgttcatccagctggtgcagacctacaaccagctgttcgaggagaaccccatcaacgcctccggcgtggacgccaaggccatcctgtccgcccggctgtccaagtcccggcggctggagaacctgatcgcccagctgcccggcgagaagaagaacggcctgttcggcaacctgatcgccctgtccctgggcctgacccccaacttcaagtccaacttcgacctggccgaggacgccaagctgcagctgtccaaggacacctacgacgacgacctggacaacctgctggcccagatcggcgaccagtacgccgacctgttcctggccgccaagaacctgtccgacgccatcctgctgtccgacatcctgcgggtgaacaccgagatcaccaaggcccccctgtccgcctccatgatcaagcggtacgacgagcaccaccaggacctgaccctgctgaaggccctggtgcggcagcagctgcccgagaagtacaaggagatcttcttcgaccagtccaagaacggctacgccggctacatcgacggcggcgcctcccaggaggagttctacaagttcatcaagcccatcctggagaagatggacggcaccgaggagctgctggtgaagctgaaccgggaggacctgctgcggaagcagcggaccttcgacaacggctccatcccccaccagatccacctgggcgagctgcacgccatcctgcggcggcaggaggacttctaccccttcctgaaggacaaccgggagaagatcgagaagatcctgaccttccggatcccctactacgtgggccccctggcccggggcaactcccggttcgcctggatgacccggaagtccgaggagaccatcaccccctggaacttcgaggaggtggtggacaagggcgcctccgcccagtccttcatcgagcggatgaccaacttcgacaagaacctgcccaacgagaaggtgctgcccaagcactccctgctgtacgagtacttcaccgtgtacaacgagctgaccaaggtgaagtacgtgaccgagggcatgcggaagcccgccttcctgtccggcgagcagaagaaggccatcgtggacctgctgttcaagaccaaccggaaggtgaccgtgaagcagctgaaggaggactacttcaagaagatcgagtgcttcgactccgtggagatctccggcgtggaggaccggttcaacgcctccctgggcacctaccacgacctgctgaagatcatcaaggacaaggacttcctggacaacgaggagaacgaggacatcctggaggacatcgtgctgaccctgaccctgttcgaggaccgggagatgatcgaggagcggctgaagacctacgcccacctgttcgacgacaaggtgatgaagcagctgaagcggcggcggtacaccggctggggccggctgtcccggaagctgatcaacggcatccgggacaagcagtccggcaagaccatcctggacttcctgaagtccgacggcttcgccaaccggaacttcatgcagctgatccacgacgactccctgaccttcaaggaggacatccagaaggcccaggtgtccggccagggcgactccctgcacgagcacatcgccaacctggccggctcccccgccatcaagaagggcatcctgcagaccgtgaaggtggtggacgagctggtgaaggtgatgggccggcacaagcccgagaacatcgtgatcgagatggcccgggagaaccagaccacccagaagggccagaagaactcccgggagcggatgaagcggatcgaggagggcatcaaggagctgggctcccagatcctgaaggagcaccccgtggagaacacccagctgcagaacgagaagctgtacctgtactacctgcagaacggccgggacatgtacgtggaccaggagctggacatcaaccggctgtccgactacgacgtggaccacatcgtgccccagtccttcctgaaggacgactccatcgacaacaaggtgctgacccggtccgacaagaaccggggcaagtccgacaacgtgccctccgaggaggtggtgaagaagatgaagaactactggcggcagctgctgaacgccaagctgatcacccagcggaagttcgacaacctgaccaaggccgagcggggcggcctgtccgagctggacaaggccggcttcatcaagcggcagctggtggagacccggcagatcaccaagcacgtggcccagatcctggactcccggatgaacaccaagtacgacgagaacgacaagctgatccgggaggtgaaggtgatcaccctgaagtccaagctggtgtccgacttccggaaggacttccagttctacaaggtgcgggagatcaacaactaccaccacgcccacgacgcctacctgaacgccgtggtgggcaccgccctgatcaagaagtaccccaagctggagtccgagttcgtgtacggcgactacaaggtgtacgacgtgcggaagatgatcgccaagtccgagcaggagatcggcaaggccaccgccaagtacttcttctactccaacatcatgaacttcttcaagaccgagatcaccctggccaacggcgagatccggaagcggcccctgatcgagaccaacggcgagaccggcgagatcgtgtgggacaagggccgggacttcgccaccgtgcggaaggtgctgtccatgccccaggtgaacatcgtgaagaagaccgaggtgcagaccggcggcttctccaaggagtccatcctgcccaagcggaactccgacaagctgatcgcccggaagaaggactgggaccccaagaagtacggcggcttcgactcccccaccgtggcctactccgtgctggtggtggccaaggtggagaagggcaagtccaagaagctgaagtccgtgaaggagctgctgggcatcaccatcatggagcggtcctccttcgagaagaaccccatcgacttcctggaggccaagggctacaaggaggtgaagaaggacctgatcatcaagctgcccaagtactccctgttcgagctggagaacggccggaagcggatgctggcctccgccggcgagctgcagaagggcaacgagctggccctgccctccaagtacgtgaacttcctgtacctggcctcccactacgagaagctgaagggctcccccgaggacaacgagcagaagcagctgttcgtggagcagcacaagcactacctggacgagatcatcgagcagatctccgagttctccaagcgggtgatcctggccgacgccaacctggacaaggtgctgtccgcctacaacaagcaccgggacaagcccatccgggagcaggccgagaacatcatccacctgttcaccctgaccaacctgggcgcccccgccgccttcaagtacttcgacaccaccatcgacaagaagcggtacacctccaccaaggaggtgctggacgccaccctgatccaccagtccatcaccggcctgtacgagacccggatcgacctgtcccagctgggcggcgac

SEQ ID NO: 105 - protein, 1368 aa, synthetic construct
  REGION 1..1368: note = Synthetic: Amino acid sequence for Spy Cas9 R1333K suitable for fusion constructs
GDKKYSIGLDIGTNSVGWAVITDEYKVPSKKFKVLGNTDRHSIKKNLIGALLFDSGETAEATRLKRTARRRYTRRKNRICYLQEIFSNEMAKVDDSFFHRLEESFLVEEDKKHERHPIFGNIVDEVAYHEKYPTIYHLRKKLVDSTDKADLRLIYLALAHMIKFRGHFLIEGDLNPDNSDVDKLFIQLVQTYNQLFEENPINASGVDAKAILSARLSKSRRLENLIAQLPGEKKNGLFGNLIALSLGLTPNFKSNFDLAEDAKLQLSKDTYDDDLDNLLAQIGDQYADLFLAAKNLSDAILLSDILRVNTEITKAPLSASMIKRYDEHHQDLTLLKALVRQQLPEKYKEIFFDQSKNGYAGYIDGGASQEEFYKFIKPILEKMDGTEELLVKLNREDLLRKQRTFDNGSIPHQIHLGELHAILRRQEDFYPFLKDNREKIEKILTFRIPYYVGPLARGNSRFAWMTRKSEETITPWNFEEVVDKGASAQSFIERMTNFDKNLPNEKVLPKHSLLYEYFTVYNELTKVKYVTEGMRKPAFLSGEQKKAIVDLLFKTNRKVTVKQLKEDYFKKIECFDSVEISGVEDRFNASLGTYHDLLKIIKDKDFLDNEENEDILEDIVLTLTLFEDREMIEERLKTYAHLFDDKVMKQLKRRRYTGWGRLSRKLINGIRDKQSGKTILDFLKSDGFANRNFMQLIHDDSLTFKEDIQKAQVSGQGDSLHEHIANLAGSPAIKKGILQTVKVVDELVKVMGRHKPENIVIEMARENQTTQKGQKNSRERMKRIEEGIKELGSQILKEHPVENTQLQNEKLYLYYLQNGRDMYVDQELDINRLSDYDVDHIVPQSFLKDDSIDNKVLTRSDKNRGKSDNVPSEEVVKKMKNYWRQLLNAKLITQRKFDNLTKAERGGLSELDKAGFIKRQLVETRQITKHVAQILDSRMNTKYDENDKLIREVKVITLKSKLVSDFRKDFQFYKVREINNYHHAHDAYLNAVVGTALIKKYPKLESEFVYGDYKVYDVRKMIAKSEQEIGKATAKYFFYSNIMNFFKTEITLANGEIRKRPLIETNGETGEIVWDKGRDFATVRKVLSMPQVNIVKKTEVQTGGFSKESILPKRNSDKLIARKKDWDPKKYGGFDSPTVAYSVLVVAKVEKGKSKKLKSVKELLGITIMERSSFEKNPIDFLEAKGYKEVKKDLIIKLPKYSLFELENGRKRMLASAGELQKGNELALPSKYVNFLYLASHYEKLKGSPEDNEQKQLFVEQHKHYLDEIIEQISEFSKRVILADANLDKVLSAYNKHRDKPIREQAENIIHLFTLTNLGAPAAFKYFDTTIDKKRYTSTKEVLDATLIHQSITGLYETRIDLSQLGGD

SEQ ID NO: 106 - RNA, 3312 nt, synthetic construct
  misc_feature 1..3312: note = Synthetic: WT Nme1 Cas9 coding sequence
  source 1..3312: mol_type = other RNA
atggcagcattcaagccgaactcgatcaactacatcctgggactggacatcggaatcgcatcggtcggatgggcaatggtcgaaatcgacgaagaagaaaacccgatcagactgatcgacctgggagtcagagtcttcgaaagagcagaagtcccgaagacaggagactcgctggcaatggcaagaagactggcaagatcggtcagaagactgacaagaagaagagcacacagactgctgagaacaagaagactgctgaagagagaaggagtcctgcaggcagcaaacttcgacgaaaacggactgatcaagtcgctgccgaacacaccgtggcagctgagagcagcagcactggacagaaagctgacaccgctggaatggtcggcagtcctgctgcacctgatcaagcacagaggatacctgtcgcagagaaagaacgaaggagaaacagcagacaaggaactgggagcactgctgaagggagtcgcaggaaacgcacacgcactgcagacaggagacttcagaacaccggcagaactggcactgaacaagttcgaaaaggaatcgggacacatcagaaaccagagatcggactactcgcacacattctcgagaaaggacctgcaggcagaactgatcctgctgttcgaaaagcagaaggaattcggaaacccgcacgtctcgggaggactgaaggaaggaatcgaaacactgctgatgacacagagaccggcactgtcgggagacgcagtccagaagatgctgggacactgcacattcgaaccggcagaaccgaaggcagcaaagaacacatacacagcagaaagattcatctggctgacaaagctgaacaacctgagaatcctggaacagggatcggaaagaccgctgacagacacagaaagagcaacactgatggacgaaccgtacagaaagtcgaagctgacatacgcacaggcaagaaagctgctgggactggaagacacagcattcttcaagggactgagatacggaaaggacaacgcagaagcatcgacactgatggaaatgaaggcataccacgcaatctcgagagcactggaaaaggaaggactgaaggacaagaagtcgccgctgaacctgtcgccggaactgcaggacgaaatcggaacagcattctcgctgttcaagacagacgaagacatcacaggaagactgaaggacagaatccagccggaaatcctggaagcactgctgaagcacatctcgttcgacaagttcgtccagatctcgctgaaggcactgagaagaatcgtcccgctgatggaacagggaaagagatacgacgaagcatgcgcagaaatctacggagaccactacggaaagaagaacacagaagaaaagatctacctgccgccgatcccggcagacgaaatcagaaacccggtcgtcctgagagcactgtcgcaggcaagaaaggtcatcaacggagtcgtcagaagatacggatcgccggcaagaatccacatcgaaacagcaagagaagtcggaaagtcgttcaaggacagaaaggaaatcgaaaagagacaggaagaaaacagaaaggacagagaaaaggcagcagcaaagttcagagaatacttcccgaacttcgtcggagaaccgaagtcgaaggacatcctgaagctgagactgtacgaacagcagcacggaaagtgcctgtactcgggaaaggaaatcaacctgggaagactgaacgaaaagggatacgtcgaaatcgaccacgcactgccgttctcgagaacatgggacgactcgttcaacaacaaggtcctggtcctgggatcggaaaaccagaacaagggaaaccagacaccgtacgaatacttcaacggaaaggacaactcgagagaatggcaggaattcaaggcaagagtcgaaacatcgagattcccgagatcgaagaagcagagaatcctgctgcagaagttcgacgaagacggattcaaggaaagaaacctgaacgacacaagatacgtcaacagattcctgtgccagttcgtcgcagacagaatgagactgacaggaaagggaaagaagagagtcttcgcatcgaacggacagatcacaaacctgctgagaggattctggggactgagaaaggtcagagcagaaaacgacagacaccacgcactggacgcagtcgtcgtcgcatgctcgacagtcgcaatgcagcagaagatcacaagattcgtcagatacaaggaaatgaacgcattcgacggaaagacaatcgacaaggaaacaggagaagtcctgcaccagaagacacacttcccgcagccgtgggaattcttcgcacaggaagtcatgatcagagtcttcggaaagccggacggaaagccggaattcgaagaagcagacacactggaaaagctgagaacactgctggcagaaaagctgtcgtcgagaccggaagcagtccacgaatacgtcacaccgctgttcgtctcgagagcaccgaacagaaagatgtcgggacagggacacatggaaacagtcaagtcggcaaagagactggacgaaggagtctcggtcctgagagtcccgctgacacagctgaagctgaaggacctggaaaagatggtcaacagagaaagagaaccgaagctgtacgaagcactgaaggcaagactggaagcacacaaggacgacccggcaaaggcattcgcagaaccgttctacaagtacgacaaggcaggaaacagaacacagcaggtcaaggcagtcagagtcgaacaggtccagaagacaggagtctgggtcagaaaccacaacggaatcgcagacaacgcaacaatggtcagagtagacgtcttcgaaaagggagacaagtactacctggtcccgatctactcgtggcaggtcgcaaagggaatcctgccggacagagcagtcgtccagggaaaggacgaagaagactggcagctgatcgacgactcgttcaacttcaagttctcgctgcacccgaacgacctggtcgaagtcatcacaaagaaggcaagaatgttcggatacttcgcatcgtgccacagaggaacaggaaacatcaacatcagaatccacgacctggaccacaagatcggaaagaacggaatcctggaaggaatcggagtcaagacagcactgtcgttccagaagtaccagatcgacgaactgggaaaggaaatcagaccgtgcagactgaagaagagaccgccggtcagatccggaaagagaacagcagacggatcggaattcgaatcgccgaagaagaagagaaaggtcgaatga

SEQ ID NO: 107 - protein, 1103 aa, synthetic construct
  REGION 1..1103: note = Synthetic: WT Nme1 Cas9 amino acid sequence
MAAFKPNSINYILGLDIGIASVGWAMVEIDEEENPIRLIDLGVRVFERAEVPKTGDSLAMARRLARSVRRLTRRRAHRLLRTRRLLKREGVLQAANFDENGLIKSLPNTPWQLRAAALDRKLTPLEWSAVLLHLIKHRGYLSQRKNEGETADKELGALLKGVAGNAHALQTGDFRTPAELALNKFEKESGHIRNQRSDYSHTFSRKDLQAELILLFEKQKEFGNPHVSGGLKEGIETLLMTQRPALSGDAVQKMLGHCTFEPAEPKAAKNTYTAERFIWLTKLNNLRILEQGSERPLTDTERATLMDEPYRKSKLTYAQARKLLGLEDTAFFKGLRYGKDNAEASTLMEMKAYHAISRALEKEGLKDKKSPLNLSPELQDEIGTAFSLFKTDEDITGRLKDRIQPEILEALLKHISFDKFVQISLKALRRIVPLMEQGKRYDEACAEIYGDHYGKKNTEEKIYLPPIPADEIRNPVVLRALSQARKVINGVVRRYGSPARIHIETAREVGKSFKDRKEIEKRQEENRKDREKAAAKFREYFPNFVGEPKSKDILKLRLYEQQHGKCLYSGKEINLGRLNEKGYVEIDHALPFSRTWDDSFNNKVLVLGSENQNKGNQTPYEYFNGKDNSREWQEFKARVETSRFPRSKKQRILLQKFDEDGFKERNLNDTRYVNRFLCQFVADRMRLTGKGKKRVFASNGQITNLLRGFWGLRKVRAENDRHHALDAVVVACSTVAMQQKITRFVRYKEMNAFDGKTIDKETGEVLHQKTHFPQPWEFFAQEVMIRVFGKPDGKPEFEEADTLEKLRTLLAEKLSSRPEAVHEYVTPLFVSRAPNRKMSGQGHMETVKSAKRLDEGVSVLRVPLTQLKLKDLEKMVNREREPKLYEALKARLEAHKDDPAKAFAEPFYKYDKAGNRTQQVKAVRVEQVQKTGVWVRNHNGIADNATMVRVDVFEKGDKYYLVPIYSWQVAKGILPDRAVVQGKDEEDWQLIDDSFNFKFSLHPNDLVEVITKKARMFGYFASCHRGTGNINIRIHDLDHKIGKNGILEGIGVKTALSFQKYQIDELGKEIRPCRLKKRPPVRSGKRTADGSEFESPKKKRKVE

SEQ ID NO: 108 - RNA, 3246 nt, synthetic construct
  misc_feature 1..3246: note = Synthetic: Nme2 Cas9 coding sequence
  source 1..3246: mol_type = other RNA
atggccgccttcaagcccaaccccatcaactacatcctgggcctggacatcggcatcgcctccgtgggctgggccatggtggagatcgacgaggaggagaaccccatccggctgatcgacctgggcgtgcgggtgttcgagcgggccgaggtgcccaagaccggcgactccctggccatggcccggcggctggcccggtccgtgcggcggctgacccggcggcgggcccaccggctgctgcgggcccggcggctgctgaagcgggagggcgtgctgcaggccgccgacttcgacgagaacggcctgatcaagtccctgcccaacaccccctggcagctgcgggccgccgccctggaccggaagctgacccccctggagtggtccgccgtgctgctgcacctgatcaagcaccggggctacctgtcccagcggaagaacgagggcgagaccgccgacaaggagctgggcgccctgctgaagggcgtggccaacaacgcccacgccctgcagaccggcgacttccggacccccgccgagctggccctgaacaagttcgagaaggagtccggccacatccggaaccagcggggcgactactcccacaccttctcccggaaggacctgcaggccgagctgatcctgctgttcgagaagcagaaggagttcggcaacccccacgtgtccggcggcctgaaggagggcatcgagaccctgctgatgacccagcggcccgccctgtccggcgacgccgtgcagaagatgctgggccactgcaccttcgagcccgccgagcccaaggccgccaagaacacctacaccgccgagcggttcatctggctgaccaagctgaacaacctgcggatcctggagcagggctccgagcggcccctgaccgacaccgagcgggccaccctgatggacgagccctaccggaagtccaagctgacctacgcccaggcccggaagctgctgggcctggaggacaccgccttcttcaagggcctgcggtacggcaaggacaacgccgaggcctccaccctgatggagatgaaggcctaccacgccatctcccgggccctggagaaggagggcctgaaggacaagaagtcccccctgaacctgtcctccgagctgcaggacgagatcggcaccgccttctccctgttcaagaccgacgaggacatcaccggccggctgaaggaccgggtgcagcccgagatcctggaggccctgctgaagcacatctccttcgacaagttcgtgcagatctccctgaaggccctgcggcggatcgtgcccctgatggagcagggcaagcggtacgacgaggcctgcgccgagatctacggcgaccactacggcaagaagaacaccgaggagaagatctacctgccccccatccccgccgacgagatccggaaccccgtggtgctgcgggccctgtcccaggcccggaaggtgatcaacggcgtggtgcggcggtacggctcccccgcccggatccacatcgagaccgcccgggaggtgggcaagtccttcaaggaccggaaggagatcgagaagcggcaggaggagaaccggaaggaccgggagaaggccgccgccaagttccgggagtacttccccaacttcgtgggcgagcccaagtccaaggacatcctgaagctgcggctgtacgagcagcagcacggcaagtgcctgtactccggcaaggagatcaacctggtgcggctgaacgagaagggctacgtggagatcgaccacgccctgcccttctcccggacctgggacgactccttcaacaacaaggtgctggtgctgggctccgagaaccagaacaagggcaaccagaccccctacgagtacttcaacggcaaggacaactcccgggagtggcaggagttcaaggcccgggtggagacctcccggttcccccggtccaagaagcagcggatcctgctgcagaagttcgacgaggacggcttcaaggagtgcaacctgaacgacacccggtacgtgaaccggttcctgtgccagttcgtggccgaccacatcctgctgaccggcaagggcaagcggcgggtgttcgcctccaacggccagatcaccaacctgctgcggggcttctggggcctgcggaaggtgcgggccgagaacgaccggcaccacgccctggacgccgtggtggtggcctgctccaccgtggccatgcagcagaagatcacccggttcgtgcggtacaaggagatgaacgccttcgacggcaagaccatcgacaaggagaccggcaaggtgctgcaccagaagacccacttcccccagccctgggagttcttcgcccaggaggtgatgatccgggtgttcggcaagcccgacggcaagcccgagttcgaggaggccgacacccccgagaagctgcggaccctgctggccgagaagctgtcctcccggcccgaggccgtgcacgagtacgtgacccccctgttcgtgtcccgggcccccaaccggaagatgtccggcgcccacaaggacaccctgcggtccgccaagcggttcgtgaagcacaacgagaagatctccgtgaagcgggtgtggctgaccgagatcaagctggccgacctggagaacatggtgaactacaagaacggccgggagatcgagctgtacgaggccctgaaggcccggctggaggcctacggcggcaacgccaagcaggccttcgaccccaaggacaaccccttctacaagaagggcggccagctggtgaaggccgtgcgggtggagaagacccaggagtccggcgtgctgctgaacaagaagaacgcctacaccatcgccgacaacggcgacatggtgcgggtggacgtgttctgcaaggtggacaagaagggcaagaaccagtacttcatcgtgcccatctacgcctggcaggtggccgagaacatcctgcccgacatcgactgcaagggctaccggatcgacgactcctacaccttctgcttctccctgcacaagtacgacctgatcgccttccagaaggacgagaagtccaaggtggagttcgcctactacatcaactgcgactcctccaacggccggttctacctggcctggcacgacaagggctccaaggagcagcagttccggatctccacccagaacctggtgctgatccagaagtaccaggtgaacgagctgggcaaggagatccggccctgccggctgaagaagcggccccccgtgcgg

SEQ ID NO: 109 - protein, 1082 aa, synthetic construct
  REGION 1..1082: note = Synthetic: Nme2 Cas9 amino acid sequence
MAAFKPNPINYILGLDIGIASVGWAMVEIDEEENPIRLIDLGVRVFERAEVPKTGDSLAMARRLARSVRRLTRRRAHRLLRARRLLKREGVLQAADFDENGLIKSLPNTPWQLRAAALDRKLTPLEWSAVLLHLIKHRGYLSQRKNEGETADKELGALLKGVANNAHALQTGDFRTPAELALNKFEKESGHIRNQRGDYSHTFSRKDLQAELILLFEKQKEFGNPHVSGGLKEGIETLLMTQRPALSGDAVQKMLGHCTFEPAEPKAAKNTYTAERFIWLTKLNNLRILEQGSERPLTDTERATLMDEPYRKSKLTYAQARKLLGLEDTAFFKGLRYGKDNAEASTLMEMKAYHAISRALEKEGLKDKKSPLNLSSELQDEIGTAFSLFKTDEDITGRLKDRVQPEILEALLKHISFDKFVQISLKALRRIVPLMEQGKRYDEACAEIYGDHYGKKNTEEKIYLPPIPADEIRNPVVLRALSQARKVINGVVRRYGSPARIHIETAREVGKSFKDRKEIEKRQEENRKDREKAAAKFREYFPNFVGEPKSKDILKLRLYEQQHGKCLYSGKEINLVRLNEKGYVEIDHALPFSRTWDDSFNNKVLVLGSENQNKGNQTPYEYFNGKDNSREWQEFKARVETSRFPRSKKQRILLQKFDEDGFKECNLNDTRYVNRFLCQFVADHILLTGKGKRRVFASNGQITNLLRGFWGLRKVRAENDRHHALDAVVVACSTVAMQQKITRFVRYKEMNAFDGKTIDKETGKVLHQKTHFPQPWEFFAQEVMIRVFGKPDGKPEFEEADTPEKLRTLLAEKLSSRPEAVHEYVTPLFVSRAPNRKMSGAHKDTLRSAKRFVKHNEKISVKRVWLTEIKLADLENMVNYKNGREIELYEALKARLEAYGGNAKQAFDPKDNPFYKKGGQLVKAVRVEKTQESGVLLNKKNAYTIADNGDMVRVDVFCKVDKKGKNQYFIVPIYAWQVAENILPDIDCKGYRIDDSYTFCFSLHKYDLIAFQKDEKSKVEFAYYINCDSSNGRFYLAWHDKGSKEQQFRISTQNLVLIQKYQVNELGKEIRPCRLKKRPPVR

SEQ ID NO: 110 - RNA, 4140 nt, synthetic construct; identical to SEQ ID NO: 94
  misc_feature 1..4140: note = Synthetic: WT SpyCas9- ORF sequence
  source 1..4140: mol_type = other RNA

SEQ ID NO: 111 - protein, 1379 aa, synthetic construct; identical to SEQ ID NO: 19
  REGION 1..1379: note = Synthetic: WT SpyCas9- amino acid sequence

SEQ ID NO: 112-119 - skipped (8 entries)

SEQ ID NO: 120 - protein, 1082 aa, synthetic construct
  REGION 1..1082: note = Synthetic: Exemplary amino acid sequence of Nme1Cas9 cleavase
MAAFKPNSINYILGLDIGIASVGWAMVEIDEEENPIRLIDLGVRVFERAEVPKTGDSLAMARRLARSVRRLTRRRAHRLLRTRRLLKREGVLQAANFDENGLIKSLPNTPWQLRAAALDRKLTPLEWSAVLLHLIKHRGYLSQRKNEGETADKELGALLKGVAGNAHALQTGDFRTPAELALNKFEKESGHIRNQRSDYSHTFSRKDLQAELILLFEKQKEFGNPHVSGGLKEGIETLLMTQRPALSGDAVQKMLGHCTFEPAEPKAAKNTYTAERFIWLTKLNNLRILEQGSERPLTDTERATLMDEPYRKSKLTYAQARKLLGLEDTAFFKGLRYGKDNAEASTLMEMKAYHAISRALEKEGLKDKKSPLNLSPELQDEIGTAFSLFKTDEDITGRLKDRIQPEILEALLKHISFDKFVQISLKALRRIVPLMEQGKRYDEACAEIYGDHYGKKNTEEKIYLPPIPADEIRNPVVLRALSQARKVINGVVRRYGSPARIHIETAREVGKSFKDRKEIEKRQEENRKDREKAAAKFREYFPNFVGEPKSKDILKLRLYEQQHGKCLYSGKEINLGRLNEKGYVEIDHALPFSRTWDDSFNNKVLVLGSENQNKGNQTPYEYFNGKDNSREWQEFKARVETSRFPRSKKQRILLQKFDEDGFKERNLNDTRYVNRFLCQFVADRMRLTGKGKKRVFASNGQITNLLRGFWGLRKVRAENDRHHALDAVVVACSTVAMQQKITRFVRYKEMNAFDGKTIDKETGEVLHQKTHFPQPWEFFAQEVMIRVFGKPDGKPEFEEADTLEKLRTLLAEKLSSRPEAVHEYVTPLFVSRAPNRKMSGQGHMETVKSAKRLDEGVSVLRVPLTQLKLKDLEKMVNREREPKLYEALKARLEAHKDDPAKAFAEPFYKYDKAGNRTQQVKAVRVEQVQKTGVWVRNHNGIADNATMVRVDVFEKGDKYYLVPIYSWQVAKGILPDRAVVQGKDEEDWQLIDDSFNFKFSLHPNDLVEVITKKARMFGYFASCHRGTGNINIRIHDLDHKIGKNGILEGIGVKTALSFQKYQIDELGKEIRPCRLKKRPPVR

SEQ ID NO: 121 - DNA, 3243 bp, synthetic construct
  misc_feature 1..3243: note = Synthetic: Exemplary coding sequence encoding Nme1Cas9 cleavase
  source 1..3243: mol_type = other DNA
gctgcttttaagcctaattctattaattatattcttggtcttgatattggtattgcttctgttggttgggctatggttgagattgatgaggaggagaatcctattcgtcttattgatcttggtgttcgtgtttttgagcgtgctgaggttcctaagactggtgattctcttgctatggctcgtcgtcttgctcgttctgttcgtcgtcttactcgtcgtcgtgctcatcgtcttcttcgtactcgtcgtcttcttaagcgtgagggtgttcttcaggctgctaattttgatgagaatggtcttattaagtctcttcctaatactccttggcagcttcgtgctgctgctcttgatcgtaagcttactcctcttgagtggtctgctgttcttcttcatcttattaagcatcgtggttatctttctcagcgtaagaatgagggtgagactgctgataaggagcttggtgctcttcttaagggtgttgctggtaatgctcatgctcttcagactggtgattttcgtactcctgctgagcttgctcttaataagtttgagaaggagtctggtcatattcgtaatcagcgttctgattattctcatactttttctcgtaaggatcttcaggctgagcttattcttctttttgagaagcagaaggagtttggtaatcctcatgtttctggtggtcttaaggagggtattgagactcttcttatgactcagcgtcctgctctttctggtgatgctgttcagaagatgcttggtcattgtacttttgagcctgctgagcctaaggctgctaagaatacttatactgctgagcgttttatttggcttactaagcttaataatcttcgtattcttgagcagggttctgagcgtcctcttactgatactgagcgtgctactcttatggatgagccttatcgtaagtctaagcttacttatgctcaggctcgtaagcttcttggtcttgaggatactgctttttttaagggtcttcgttatggtaaggataatgctgaggcttctactcttatggagatgaaggcttatcatgctatttctcgtgctcttgagaaggagggtcttaaggataagaagtctcctcttaatctttctcctgagcttcaggatgagattggtactgctttttctctttttaagactgatgaggatattactggtcgtcttaaggatcgtattcagcctgagattcttgaggctcttcttaagcatatttcttttgataagtttgttcagatttctcttaaggctcttcgtcgtattgttcctcttatggagcagggtaagcgttatgatgaggcttgtgctgagatttatggtgatcattatggtaagaagaatactgaggagaagatttatcttcctcctattcctgctgatgagattcgtaatcctgttgttcttcgtgctctttctcaggctcgtaaggttattaatggtgttgttcgtcgttatggttctcctgctcgtattcatattgagactgctcgtgaggttggtaagtcttttaaggatcgtaaggagattgagaagcgtcaggaggagaatcgtaaggatcgtgagaaggctgctgctaagtttcgtgagtattttcctaattttgttggtgagcctaagtctaaggatattcttaagcttcgtctttatgagcagcagcatggtaagtgtctttattctggtaaggagattaatcttggtcgtcttaatgagaagggttatgttgagattgatcatgctcttcctttttctcgtacttgggatgattcttttaataataaggttcttgttcttggttctgagaatcagaataagggtaatcagactccttatgagtattttaatggtaaggataattctcgtgagtggcaggagtttaaggctcgtgttgagacttctcgttttcctcgttctaagaagcagcgtattcttcttcagaagtttgatgaggatggttttaaggagcgtaatcttaatgatactcgttatgttaatcgttttctttgtcagtttgttgctgatcgtatgcgtcttactggtaagggtaagaagcgtgtttttgcttctaatggtcagattactaatcttcttcgtggtttttggggtcttcgtaaggttcgtgctgagaatgatcgtcatcatgctcttgatgctgttgttgttgcttgttctactgttgctatgcagcagaagattactcgttttgttcgttataaggagatgaatgcttttgatggtaagactattgataaggagactggtgaggttcttcatcagaagactcattttcctcagccttgggagttttttgctcaggaggttatgattcgtgtttttggtaagcctgatggtaagcctgagtttgaggaggctgatactcttgagaagcttcgtactcttcttgctgagaagctttcttctcgtcctgaggctgttcatgagtatgttactcctctttttgtttctcgtgctcctaatcgtaagatgtctggtcagggtcatatggagactgttaagtctgctaagcgtcttgatgagggtgtttctgttcttcgtgttcctcttactcagcttaagcttaaggatcttgagaagatggttaatcgtgagcgtgagcctaagctttatgaggctcttaaggctcgtcttgaggctcataaggatgatcctgctaaggcttttgctgagcctttttataagtatgataaggctggtaatcgtactcagcaggttaaggctgttcgtgttgagcaggttcagaagactggtgtttgggttcgtaatcataatggtattgctgataatgctactatggttcgtgttgatgtttttgagaagggtgataagtattatcttgttcctatttattcttggcaggttgctaagggtattcttcctgatcgtgctgttgttcagggtaaggatgaggaggattggcagcttattgatgattcttttaattttaagttttctcttcatcctaatgatcttgttgaggttattactaagaaggctcgtatgtttggttattttgcttcttgtcatcgtggtactggtaatattaatattcgtattcatgatcttgatcataagattggtaagaatggtattcttgagggtattggtgttaagactgctctttcttttcagaagtatcagattgatgagcttggtaaggagattcgtccttgtcgtcttaagaagcgtcctcctgttcgt

SEQ ID NO: 122 - DNA, 3243 bp, synthetic construct
  misc_feature 1..3243: note = Synthetic: Exemplary coding sequence encoding Nme1Cas9 cleavase
  source 1..3243: mol_type = other DNA
gccgccttcaagcccaactccatcaactacatcctgggcctggacatcggcatcgcctccgtgggctgggccatggtggagatcgacgaggaggagaaccccatccggctgatcgacctgggcgtgcgggtgttcgagcgggccgaggtgcccaagaccggcgactccctggccatggcccggcggctggcccggtccgtgcggcggctgacccggcggcgggcccaccggctgctgcggacccggcggctgctgaagcgggagggcgtgctgcaggccgccaacttcgacgagaacggcctgatcaagtccctgcccaacaccccctggcagctgcgggccgccgccctggaccggaagctgacccccctggagtggtccgccgtgctgctgcacctgatcaagcaccggggctacctgtcccagcggaagaacgagggcgagaccgccgacaaggagctgggcgccctgctgaagggcgtggccggcaacgcccacgccctgcagaccggcgacttccggacccccgccgagctggccctgaacaagttcgagaaggagtccggccacatccggaaccagcggtccgactactcccacaccttctcccggaaggacctgcaggccgagctgatcctgctgttcgagaagcagaaggagttcggcaacccccacgtgtccggcggcctgaaggagggcatcgagaccctgctgatgacccagcggcccgccctgtccggcgacgccgtgcagaagatgctgggccactgcaccttcgagcccgccgagcccaaggccgccaagaacacctacaccgccgagcggttcatctggctgaccaagctgaacaacctgcggatcctggagcagggctccgagcggcccctgaccgacaccgagcgggccaccctgatggacgagccctaccggaagtccaagctgacctacgcccaggcccggaagctgctgggcctggaggacaccgccttcttcaagggcctgcggtacggcaaggacaacgccgaggcctccaccctgatggagatgaaggcctaccacgccatctcccgggccctggagaaggagggcctgaaggacaagaagtcccccctgaacctgtcccccgagctgcaggacgagatcggcaccgccttctccctgttcaagaccgacgaggacatcaccggccggctgaaggaccggatccagcccgagatcctggaggccctgctgaagcacatctccttcgacaagttcgtgcagatctccctgaaggccctgcggcggatcgtgcccctgatggagcagggcaagcggtacgacgaggcctgcgccgagatctacggcgaccactacggcaagaagaacaccgaggagaagatctacctgccccccatccccgccgacgagatccggaaccccgtggtgctgcgggccctgtcccaggcccggaaggtgatcaacggcgtggtgcggcggtacggctcccccgcccggatccacatcgagaccgcccgggaggtgggcaagtccttcaaggaccggaaggagatcgagaagcggcaggaggagaaccggaaggaccgggagaaggccgccgccaagttccgggagtacttccccaacttcgtgggcgagcccaagtccaaggacatcctgaagctgcggctgtacgagcagcagcacggcaagtgcctgtactccggcaaggagatcaacctgggccggctgaacgagaagggctacgtggagatcgaccacgccctgcccttctcccggacctgggacgactccttcaacaacaaggtgctggtgctgggctccgagaaccagaacaagggcaaccagaccccctacgagtacttcaacggcaaggacaactcccgggagtggcaggagttcaaggcccgggtggagacctcccggttcccccggtccaagaagcagcggatcctgctgcagaagttcgacgaggacggcttcaaggagcggaacctgaacgacacccggtacgtgaaccggttcctgtgccagttcgtggccgaccggatgcggctgaccggcaagggcaagaagcgggtgttcgcctccaacggccagatcaccaacctgctgcggggcttctggggcctgcggaaggtgcgggccgagaacgaccggcaccacgccctggacgccgtggtggtggcctgctccaccgtggccatgcagcagaagatcacccggttcgtgcggtacaaggagatgaacgccttcgacggcaagaccatcgacaaggagaccggcgaggtgctgcaccagaagacccacttcccccagccctgggagttcttcgcccaggaggtgatgatccgggtgttcggcaagcccgacggcaagcccgagttcgaggaggccgacaccctggagaagctgcggaccctgctggccgagaagctgtcctcccggcccgaggccgtgcacgagtacgtgacccccctgttcgtgtcccgggcccccaaccggaagatgtccggccagggccacatggagaccgtgaagtccgccaagcggctggacgagggcgtgtccgtgctgcgggtgcccctgacccagctgaagctgaaggacctggagaagatggtgaaccgggagcgggagcccaagctgtacgaggccctgaaggcccggctggaggcccacaaggacgaccccgccaaggccttcgccgagcccttctacaagtacgacaaggccggcaaccggacccagcaggtgaaggccgtgcgggtggagcaggtgcagaagaccggcgtgtgggtgcggaaccacaacggcatcgccgacaacgccaccatggtgcgggtggacgtgttcgagaagggcgacaagtactacctggtgcccatctactcctggcaggtggccaagggcatcctgcccgaccgggccgtggtgcagggcaaggacgaggaggactggcagctgatcgacgactccttcaacttcaagttctccctgcaccccaacgacctggtggaggtgatcaccaagaaggcccggatgttcggctacttcgcctcctgccaccggggcaccggcaacatcaacatccggatccacgacctggaccacaagatcggcaagaacggcatcctggagggcatcggcgtgaagaccgccctgtccttccagaagtaccagatcgacgagctgggcaaggagatccggccctgccggctgaagaagcggccccccgtgcgg

SEQ ID NO: 123 - DNA, 3243 bp, synthetic construct
  misc_feature 1..3243: note = Synthetic: Exemplary coding sequence encoding Nme1Cas9 cleavase
  source 1..3243: mol_type = other DNA
gcagcattcaaaccaaactcaatcaactacatcctaggactagacatcggaatcgcatcagtaggatgagcaatggtagaaatcgacgaagaagaaaacccaatccgactaatcgacctaggagtacgagtattcgaacgagcagaagtaccaaaaacaggagactcactagcaatggcacgacgactagcacgatcagtacgacgactaacacgacgacgagcacaccgactactacgaacacgacgactactaaaacgagaaggagtactacaagcagcaaacttcgacgaaaacggactaatcaaatcactaccaaacacaccatgacaactacgagcagcagcactagaccgaaaactaacaccactagaatgatcagcagtactactacacctaatcaaacaccgaggatacctatcacaacgaaaaaacgaaggagaaacagcagacaaagaactaggagcactactaaaaggagtagcaggaaacgcacacgcactacaaacaggagacttccgaacaccagcagaactagcactaaacaaattcgaaaaagaatcaggacacatccgaaaccaacgatcagactactcacacacattctcacgaaaagacctacaagcagaactaatcctactattcgaaaaacaaaaagaattcggaaacccacacgtatcaggaggactaaaagaaggaatcgaaacactactaatgacacaacgaccagcactatcaggagacgcagtacaaaaaatgctaggacactgcacattcgaaccagcagaaccaaaagcagcaaaaaacacatacacagcagaacgattcatctgactaacaaaactaaacaacctacgaatcctagaacaaggatcagaacgaccactaacagacacagaacgagcaacactaatggacgaaccataccgaaaatcaaaactaacatacgcacaagcacgaaaactactaggactagaagacacagcattcttcaaaggactacgatacggaaaagacaacgcagaagcatcaacactaatggaaatgaaagcataccacgcaatctcacgagcactagaaaaagaaggactaaaagacaaaaaatcaccactaaacctatcaccagaactacaagacgaaatcggaacagcattctcactattcaaaacagacgaagacatcacaggacgactaaaagaccgaatccaaccagaaatcctagaagcactactaaaacacatctcattcgacaaattcgtacaaatctcactaaaagcactacgacgaatcgtaccactaatggaacaaggaaaacgatacgacgaagcatgcgcagaaatctacggagaccactacggaaaaaaaaacacagaagaaaaaatctacctaccaccaatcccagcagacgaaatccgaaacccagtagtactacgagcactatcacaagcacgaaaagtaatcaacggagtagtacgacgatacggatcaccagcacgaatccacatcgaaacagcacgagaagtaggaaaatcattcaaagaccgaaaagaaatcgaaaaacgacaagaagaaaaccgaaaagaccgagaaaaagcagcagcaaaattccgagaatacttcccaaacttcgtaggagaaccaaaatcaaaagacatcctaaaactacgactatacgaacaacaacacggaaaatgcctatactcaggaaaagaaatcaacctaggacgactaaacgaaaaaggatacgtagaaatcgaccacgcactaccattctcacgaacatgagacgactcattcaacaacaaagtactagtactaggatcagaaaaccaaaacaaaggaaaccaaacaccatacgaatacttcaacggaaaagacaactcacgagaatgacaagaattcaaagcacgagtagaaacatcacgattcccacgatcaaaaaaacaacgaatcctactacaaaaattcgacgaagacggattcaaagaacgaaacctaaacgacacacgatacgtaaaccgattcctatgccaattcgtagcagaccgaatgcgactaacaggaaaaggaaaaaaacgagtattcgcatcaaacggacaaatcacaaacctactacgaggattctgaggactacgaaaagtacgagcagaaaacgaccgacaccacgcactagacgcagtagtagtagcatgctcaacagtagcaatgcaacaaaaaatcacacgattcgtacgatacaaagaaatgaacgcattcgacggaaaaacaatcgacaaagaaacaggagaagtactacaccaaaaaacacacttcccacaaccatgagaattcttcgcacaagaagtaatgatccgagtattcggaaaaccagacggaaaaccagaattcgaagaagcagacacactagaaaaactacgaacactactagcagaaaaactatcatcacgaccagaagcagtacacgaatacgtaacaccactattcgtatcacgagcaccaaaccgaaaaatgtcaggacaaggacacatggaaacagtaaaatcagcaaaacgactagacgaaggagtatcagtactacgagtaccactaacacaactaaaactaaaagacctagaaaaaatggtaaaccgagaacgagaaccaaaactatacgaagcactaaaagcacgactagaagcacacaaagacgacccagcaaaagcattcgcagaaccattctacaaatacgacaaagcaggaaaccgaacacaacaagtaaaagcagtacgagtagaacaagtacaaaaaacaggagtatgagtacgaaaccacaacggaatcgcagacaacgcaacaatggtacgagtagacgtattcgaaaaaggagacaaatactacctagtaccaatctactcatgacaagtagcaaaaggaatcctaccagaccgagcagtagtacaaggaaaagacgaagaagactgacaactaatcgacgactcattcaacttcaaattctcactacacccaaacgacctagtagaagtaatcacaaaaaaagcacgaatgttcggatacttcgcatcatgccaccgaggaacaggaaacatcaacatccgaatccacgacctagaccacaaaatcggaaaaaacggaatcctagaaggaatcggagtaaaaacagcactatcattccaaaaataccaaatcgacgaactaggaaaagaaatccgaccatgccgactaaaaaaacgaccaccagtacga

SEQ ID NO: 124 - DNA, 3249 bp, synthetic construct
  misc_feature 1..3249: note = Synthetic: Exemplary open reading frame for Nme1Cas9 cleavase
  modified_base 3247: mod_base = OTHER; note = uracil
  source 1..3249: mol_type = other DNA
atggctgcttttaagcctaattctattaattatattcttggtcttgatattggtattgcttctgttggttgggctatggttgagattgatgaggaggagaatcctattcgtcttattgatcttggtgttcgtgtttttgagcgtgctgaggttcctaagactggtgattctcttgctatggctcgtcgtcttgctcgttctgttcgtcgtcttactcgtcgtcgtgctcatcgtcttcttcgtactcgtcgtcttcttaagcgtgagggtgttcttcaggctgctaattttgatgagaatggtcttattaagtctcttcctaatactccttggcagcttcgtgctgctgctcttgatcgtaagcttactcctcttgagtggtctgctgttcttcttcatcttattaagcatcgtggttatctttctcagcgtaagaatgagggtgagactgctgataaggagcttggtgctcttcttaagggtgttgctggtaatgctcatgctcttcagactggtgattttcgtactcctgctgagcttgctcttaataagtttgagaaggagtctggtcatattcgtaatcagcgttctgattattctcatactttttctcgtaaggatcttcaggctgagcttattcttctttttgagaagcagaaggagtttggtaatcctcatgtttctggtggtcttaaggagggtattgagactcttcttatgactcagcgtcctgctctttctggtgatgctgttcagaagatgcttggtcattgtacttttgagcctgctgagcctaaggctgctaagaatacttatactgctgagcgttttatttggcttactaagcttaataatcttcgtattcttgagcagggttctgagcgtcctcttactgatactgagcgtgctactcttatggatgagccttatcgtaagtctaagcttacttatgctcaggctcgtaagcttcttggtcttgaggatactgctttttttaagggtcttcgttatggtaaggataatgctgaggcttctactcttatggagatgaaggcttatcatgctatttctcgtgctcttgagaaggagggtcttaaggataagaagtctcctcttaatctttctcctgagcttcaggatgagattggtactgctttttctctttttaagactgatgaggatattactggtcgtcttaaggatcgtattcagcctgagattcttgaggctcttcttaagcatatttcttttgataagtttgttcagatttctcttaaggctcttcgtcgtattgttcctcttatggagcagggtaagcgttatgatgaggcttgtgctgagatttatggtgatcattatggtaagaagaatactgaggagaagatttatcttcctcctattcctgctgatgagattcgtaatcctgttgttcttcgtgctctttctcaggctcgtaaggttattaatggtgttgttcgtcgttatggttctcctgctcgtattcatattgagactgctcgtgaggttggtaagtcttttaaggatcgtaaggagattgagaagcgtcaggaggagaatcgtaaggatcgtgagaaggctgctgctaagtttcgtgagtattttcctaattttgttggtgagcctaagtctaaggatattcttaagcttcgtctttatgagcagcagcatggtaagtgtctttattctggtaaggagattaatcttggtcgtcttaatgagaagggttatgttgagattgatcatgctcttcctttttctcgtacttgggatgattcttttaataataaggttcttgttcttggttctgagaatcagaataagggtaatcagactccttatgagtattttaatggtaaggataattctcgtgagtggcaggagtttaaggctcgtgttgagacttctcgttttcctcgttctaagaagcagcgtattcttcttcagaagtttgatgaggatggttttaaggagcgtaatcttaatgatactcgttatgttaatcgttttctttgtcagtttgttgctgatcgtatgcgtcttactggtaagggtaagaagcgtgtttttgcttctaatggtcagattactaatcttcttcgtggtttttggggtcttcgtaaggttcgtgctgagaatgatcgtcatcatgctcttgatgctgttgttgttgcttgttctactgttgctatgcagcagaagattactcgttttgttcgttataaggagatgaatgcttttgatggtaagactattgataaggagactggtgaggttcttcatcagaagactcattttcctcagccttgggagttttttgctcaggaggttatgattcgtgtttttggtaagcctgatggtaagcctgagtttgaggaggctgatactcttgagaagcttcgtactcttcttgctgagaagctttcttctcgtcctgaggctgttcatgagtatgttactcctctttttgtttctcgtgctcctaatcgtaagatgtctggtcagggtcatatggagactgttaagtctgctaagcgtcttgatgagggtgtttctgttcttcgtgttcctcttactcagcttaagcttaaggatcttgagaagatggttaatcgtgagcgtgagcctaagctttatgaggctcttaaggctcgtcttgaggctcataaggatgatcctgctaaggcttttgctgagcctttttataagtatgataaggctggtaatcgtactcagcaggttaaggctgttcgtgttgagcaggttcagaagactggtgtttgggttcgtaatcataatggtattgctgataatgctactatggttcgtgttgatgtttttgagaagggtgataagtattatcttgttcctatttattcttggcaggttgctaagggtattcttcctgatcgtgctgttgttcagggtaaggatgaggaggattggcagcttattgatgattcttttaattttaagttttctcttcatcctaatgatcttgttgaggttattactaagaaggctcgtatgtttggttattttgcttcttgtcatcgtggtactggtaatattaatattcgtattcatgatcttgatcataagattggtaagaatggtattcttgagggtattggtgttaagactgctctttcttttcagaagtatcagattgatgagcttggtaaggagattcgtccttgtcgtcttaagaagcgtcctcctgttcgttga

SEQ ID NO: 125 - DNA, 3249 bp, synthetic construct
  misc_feature 1..3249: note = Synthetic: Exemplary open reading frame for Nme1Cas9 cleavase
  modified_base 3247: mod_base = OTHER; note = uracil
  source 1..3249: mol_type = other DNA
atggccgccttcaagcccaactccatcaactacatcctgggcctggacatcggcatcgcctccgtgggctgggccatggtggagatcgacgaggaggagaaccccatccggctgatcgacctgggcgtgcgggtgttcgagcgggccgaggtgcccaagaccggcgactccctggccatggcccggcggctggcccggtccgtgcggcggctgacccggcggcgggcccaccggctgctgcggacccggcggctgctgaagcgggagggcgtgctgcaggccgccaacttcgacgagaacggcctgatcaagtccctgcccaacaccccctggcagctgcgggccgccgccctggaccggaagctgacccccctggagtggtccgccgtgctgctgcacctgatcaagcaccggggctacctgtcccagcggaagaacgagggcgagaccgccgacaaggagctgggcgccctgctgaagggcgtggccggcaacgcccacgccctgcagaccggcgacttccggacccccgccgagctggccctgaacaagttcgagaaggagtccggccacatccggaaccagcggtccgactactcccacaccttctcccggaaggacctgcaggccgagctgatcctgctgttcgagaagcagaaggagttcggcaacccccacgtgtccggcggcctgaaggagggcatcgagaccctgctgatgacccagcggcccgccctgtccggcgacgccgtgcagaagatgctgggccactgcaccttcgagcccgccgagcccaaggccgccaagaacacctacaccgccgagcggttcatctggctgaccaagctgaacaacctgcggatcctggagcagggctccgagcggcccctgaccgacaccgagcgggccaccctgatggacgagccctaccggaagtccaagctgacctacgcccaggcccggaagctgctgggcctggaggacaccgccttcttcaagggcctgcggtacggcaaggacaacgccgaggcctccaccctgatggagatgaaggcctaccacgccatctcccgggccctggagaaggagggcctgaaggacaagaagtcccccctgaacctgtcccccgagctgcaggacgagatcggcaccgccttctccctgttcaagaccgacgaggacatcaccggccggctgaaggaccggatccagcccgagatcctggaggccctgctgaagcacatctccttcgacaagttcgtgcagatctccctgaaggccctgcggcggatcgtgcccctgatggagcagggcaagcggtacgacgaggcctgcgccgagatctacggcgaccactacggcaagaagaacaccgaggagaagatctacctgccccccatccccgccgacgagatccggaaccccgtggtgctgcgggccctgtcccaggcccggaaggtgatcaacggcgtggtgcggcggtacggctcccccgcccggatccacatcgagaccgcccgggaggtgggcaagtccttcaaggaccggaaggagatcgagaagcggcaggaggagaaccggaaggaccgggagaaggccgccgccaagttccgggagtacttccccaacttcgtgggcgagcccaagtccaaggacatcctgaagctgcggctgtacgagcagcagcacggcaagtgcctgtactccggcaaggagatcaacctgggccggctgaacgagaagggctacgtggagatcgaccacgccctgcccttctcccggacctgggacgactccttcaacaacaaggtgctggtgctgggctccgagaaccagaacaagggcaaccagaccccctacgagtacttcaacggcaaggacaactcccgggagtggcaggagttcaaggcccgggtggagacctcccggttcccccggtccaagaagcagcggatcctgctgcagaagttcgacgaggacggcttcaaggagcggaacctgaacgacacccggtacgtgaaccggttcctgtgccagttcgtggccgaccggatgcggctgaccggcaagggcaagaagcgggtgttcgcctccaacggccagatcaccaacctgctgcggggcttctggggcctgcggaaggtgcgggccgagaacgaccggcaccacgccctggacgccgtggtggtggcctgctccaccgtggccatgcagcagaagatcacccggttcgtgcggtacaaggagatgaacgccttcgacggcaagaccatcgacaaggagaccggcgaggtgctgcaccagaagacccacttcccccagccctgggagttcttcgcccaggaggtgatgatccgggtgttcggcaagcccgacggcaagcccgagttcgaggaggccgacaccctggagaagctgcggaccctgctggccgagaagctgtcctcccggcccgaggccgtgcacgagtacgtgacccccctgttcgtgtcccgggcccccaaccggaagatgtccggccagggccacatggagaccgtgaagtccgccaagcggctggacgagggcgtgtccgtgctgcgggtgcccctgacccagctgaagctgaaggacctggagaagatggtgaaccgggagcgggagcccaagctgtacgaggccctgaaggcccggctggaggcccacaaggacgaccccgccaaggccttcgccgagcccttctacaagtacgacaaggccggcaaccggacccagcaggtgaaggccgtgcgggtggagcaggtgcagaagaccggcgtgtgggtgcggaaccacaacggcatcgccgacaacgccaccatggtgcgggtggacgtgttcgagaagggcgacaagtactacctggtgcccatctactcctggcaggtggccaagggcatcctgcccgaccgggccgtggtgcagggcaaggacgaggaggactggcagctgatcgacgactccttcaacttcaagttctccctgcaccccaacgacctggtggaggtgatcaccaagaaggcccggatgttcggctacttcgcctcctgccaccggggcaccggcaacatcaacatccggatccacgacctggaccacaagatcggcaagaacggcatcctggagggcatcggcgtgaagaccgccctgtccttccagaagtaccagatcgacgagctgggcaaggagatccggccctgccggctgaagaagcggccccccgtgcggtga

SEQ ID NO: 126 - DNA, 3249 bp, synthetic construct
  misc_feature 1..3249: note = Synthetic: Exemplary open reading frame for Nme1Cas9 cleavase
  modified_base 3247: mod_base = OTHER; note = uracil
  source 1..3249: mol_type = other DNA
atggcagcattcaaaccaaactcaatcaactacatcctaggactagacatcggaatcgcatcagtaggatgagcaatggtagaaatcgacgaagaagaaaacccaatccgactaatcgacctaggagtacgagtattcgaacgagcagaagtaccaaaaacaggagactcactagcaatggcacgacgactagcacgatcagtacgacgactaacacgacgacgagcacaccgactactacgaacacgacgactactaaaacgagaaggagtactacaagcagcaaacttcgacgaaaacggactaatcaaatcactaccaaacacaccatgacaactacgagcagcagcactagaccgaaaactaacaccactagaatgatcagcagtactactacacctaatcaaacaccgaggatacctatcacaacgaaaaaacgaaggagaaacagcagacaaagaactaggagcactactaaaaggagtagcaggaaacgcacacgcactacaaacaggagacttccgaacaccagcagaactagcactaaacaaattcgaaaaagaatcaggacacatccgaaaccaacgatcagactactcacacacattctcacgaaaagacctacaagcagaactaatcctactattcgaaaaacaaaaagaattcggaaacccacacgtatcaggaggactaaaagaaggaatcgaaacactactaatgacacaacgaccagcactatcaggagacgcagtacaaaaaatgctaggacactgcacattcgaaccagcagaaccaaaagcagcaaaaaacacatacacagcagaacgattcatctgactaacaaaactaaacaacctacgaatcctagaacaaggatcagaacgaccactaacagacacagaacgagcaacactaatggacgaaccataccgaaaatcaaaactaacatacgcacaagcacgaaaactactaggactagaagacacagcattcttcaaaggactacgatacggaaaagacaacgcagaagcatcaacactaatggaaatgaaagcataccacgcaatctcacgagcactagaaaaagaaggactaaaagacaaaaaatcaccactaaacctatcaccagaactacaagacgaaatcggaacagcattctcactattcaaaacagacgaagacatcacaggacgactaaaagaccgaatccaaccagaaatcctagaagcactactaaaacacatctcattcgacaaattcgtacaaatctcactaaaagcactacgacgaatcgtaccactaatggaacaaggaaaacgatacgacgaagcatgcgcagaaatctacggagaccactacggaaaaaaaaacacagaagaaaaaatctacctaccaccaatcccagcagacgaaatccgaaacccagtagtactacgagcactatcacaagcacgaaaagtaatcaacggagtagtacgacgatacggatcaccagcacgaatccacatcgaaacagcacgagaagtaggaaaatcattcaaagaccgaaaagaaatcgaaaaacgacaagaagaaaaccgaaaagaccgagaaaaagcagcagcaaaattccgagaatacttcccaaacttcgtaggagaaccaaaatcaaaagacatcctaaaactacgactatacgaacaacaacacggaaaatgcctatactcaggaaaagaaatcaacctaggacgactaaacgaaaaaggatacgtagaaatcgaccacgcactaccattctcacgaacatgagacgactcattcaacaacaaagtactagtactaggatcagaaaaccaaaacaaaggaaaccaaacaccatacgaatacttcaacggaaaagacaactcacgagaatgacaagaattcaaagcacgagtagaaacatcacgattcccacgatcaaaaaaacaacgaatcctactacaaaaattcgacgaagacggattcaaagaacgaaacctaaacgacacacgatacgtaaaccgattcctatgccaattcgtagcagaccgaatgcgactaacaggaaaaggaaaaaaacgagtattcgcatcaaacggacaaatcacaaacctactacgaggattctgaggactacgaaaagtacgagcagaaaacgaccgacaccacgcactagacgcagtagtagtagcatgctcaacagtagcaatgcaacaaaaaatcacacgattcgtacgatacaaagaaatgaacgcattcgacggaaaaacaatcgacaaagaaacaggagaagtactacaccaaaaaacacacttcccacaaccatgagaattcttcgcacaagaagtaatgatccgagtattcggaaaaccagacggaaaaccagaattcgaagaagcagacacactagaaaaactacgaacactactagcagaaaaactatcatcacgaccagaagcagtacacgaatacgtaacaccactattcgtatcacgagcaccaaaccgaaaaatgtcaggacaaggacacatggaaacagtaaaatcagcaaaacgactagacgaaggagtatcagtactacgagtaccactaacacaactaaaactaaaagacctagaaaaaatggtaaaccgagaacgagaaccaaaactatacgaagcactaaaagcacgactagaagcacacaaagacgacccagcaaaagcattcgcagaaccattctacaaatacgacaaagcaggaaaccgaacacaacaagtaaaagcagtacgagtagaacaagtacaaaaaacaggagtatgagtacgaaaccacaacggaatcgcagacaacgcaacaatggtacgagtagacgtattcgaaaaaggagacaaatactacctagtaccaatctactcatgacaagtagcaaaaggaatcctaccagaccgagcagtagtacaaggaaaagacgaagaagactgacaactaatcgacgactcattcaacttcaaattctcactacacccaaacgacctagtagaagtaatcacaaaaaaagcacgaatgttcggatacttcgcatcatgccaccgaggaacaggaaacatcaacatccgaatccacgacctagaccacaaaatcggaaaaaacggaatcctagaaggaatcggagtaaaaacagcactatcattccaaaaataccaaatcgacgaactaggaaaagaaatccgaccatgccgactaaaaaaacgaccaccagtacgataa

SEQ ID NO: 127 - protein, 1081 aa, synthetic construct
  REGION 1..1081: note = Synthetic: Exemplary amino acid sequence of Nme3Cas9 cleavase
MAAFKPNPINYILGLDIGIASVGWAMVEIDEEENPIRLIDLGVRVFERAEVPKTGDSLAMARRLARSVRRLTRRRAHRLLRARRLLKREGVLQAADFDENGLIKSLPNTPWQLRAAALDRKLTPLEWSAVLLHLIKHRGYLSQRKNEGETADKELGALLKGVADNAHALQTGDFRTPAELALNKFEKECGHIRNQRGDYSHTFSRKDLQAELNLLFEKQKEFGNPHVSGGLKEGIETLLMTQRPALSGDAVQKMLGHCTFEPAEPKAAKNTYTAERFIWLTKLNNLRILEQGSERPLTDTERATLMDEPYRKSKLTYAQARKLLSLEDTAFFKGLRYGKDNAEASTLMEMKAYHTISRALEKEGLKDKKSPLNLSPELQDEIGTAFSLFKTDEDITGRLKDRIQPEILEALLKHISFDKFVQISLKALRRIVPLMEQGKRYDEACAEIYGDHYGKKNTEEKIYLPPIPADEIRNPVVLRALSQARKVINGVVRRYGSPARIHIETAREVGKSFKDRKEIEKRQEENRKDREKAAAKFREYFPNFVGEPKSKDILKLRLYEQQHGKCLYSGKEINLGRLNEKGYVEIDHALPFSRTWDDSFNNKVLVLGSENQNKGNQTPYEYFNGKDNSREWQEFKARVETSRFPRSKKQRILLQKFDEDGFKERNLNDTRYVNRFLCQFVADRMRLTGKGKKRVFASNGQITNLLRGFWGLRKVRAENDRHHALDAVVVACSTVAMQQKITRFVRYKEMNAFDGKTIDKETGEVLHQKTHFPQPWEFFAQEVMIRVFGKPDGKPEFEEADTPEKLRTLLAEKLSSRPEAVHEYVTPLFVSRAPNRKMSGQGHMETVKSAKRLDEGVSVLRVPLTQLKLKDLEKMVNREREPKLYEALKARLEAHKDDPAKAFAEPFYKYDKAGNRTQQVKAVRVEQVQKTGVWVRNHNGIADNATMVRVDVFEKGDKYYLVPIYSWQVAKGILPDRAVVAYADEEDWTVIDESFRFKFVLYSNDLIKVQLKKDSFLGYFSGLDRATGAISLREHDLEKSKGKDGMHRIGVKTALSFQKYQIDEMGKEIRPCRLKKRPPVR

SEQ ID NO: 128 - DNA, 3240 bp, synthetic construct
  misc_feature 1..3240: note = Synthetic: Exemplary coding sequence encoding Nme3Cas9 cleavase
  source 1..3240: mol_type = other DNA
gctgcttttaagcctaatcctattaattatattcttggtcttgatattggtattgcttctgttggttgggctatggttgagattgatgaggaggagaatcctattcgtcttattgatcttggtgttcgtgtttttgagcgtgctgaggttcctaagactggtgattctcttgctatggctcgtcgtcttgctcgttctgttcgtcgtcttactcgtcgtcgtgctcatcgtcttcttcgtgctcgtcgtcttcttaagcgtgagggtgttcttcaggctgctgattttgatgagaatggtcttattaagtctcttcctaatactccttggcagcttcgtgctgctgctcttgatcgtaagcttactcctcttgagtggtctgctgttcttcttcatcttattaagcatcgtggttatctttctcagcgtaagaatgagggtgagactgctgataaggagcttggtgctcttcttaagggtgttgctgataatgctcatgctcttcagactggtgattttcgtactcctgctgagcttgctcttaataagtttgagaaggagtgtggtcatattcgtaatcagcgtggtgattattctcatactttttctcgtaaggatcttcaggctgagcttaatcttctttttgagaagcagaaggagtttggtaatcctcatgtttctggtggtcttaaggagggtattgagactcttcttatgactcagcgtcctgctctttctggtgatgctgttcagaagatgcttggtcattgtacttttgagcctgctgagcctaaggctgctaagaatacttatactgctgagcgttttatttggcttactaagcttaataatcttcgtattcttgagcagggttctgagcgtcctcttactgatactgagcgtgctactcttatggatgagccttatcgtaagtctaagcttacttatgctcaggctcgtaagcttctttctcttgaggatactgctttttttaagggtcttcgttatggtaaggataatgctgaggcttctactcttatggagatgaaggcttatcatactatttctcgtgctcttgagaaggagggtcttaaggataagaagtctcctcttaatctttctcctgagcttcaggatgagattggtactgctttttctctttttaagactgatgaggatattactggtcgtcttaaggatcgtattcagcctgagattcttgaggctcttcttaagcatatttcttttgataagtttgttcagatttctcttaaggctcttcgtcgtattgttcctcttatggagcagggtaagcgttatgatgaggcttgtgctgagatttatggtgatcattatggtaagaagaatactgaggagaagatttatcttcctcctattcctgctgatgagattcgtaatcctgttgttcttcgtgctctttctcaggctcgtaaggttattaatggtgttgttcgtcgttatggttctcctgctcgtattcatattgagactgctcgtgaggttggtaagtcttttaaggatcgtaaggagattgagaagcgtcaggaggagaatcgtaaggatcgtgagaaggctgctgctaagtttcgtgagtattttcctaattttgttggtgagcctaagtctaaggatattcttaagcttcgtctttatgagcagcagcatggtaagtgtctttattctggtaaggagattaatcttggtcgtcttaatgagaagggttatgttgagattgatcatgctcttcctttttctcgtacttgggatgattcttttaataataaggttcttgttcttggttctgagaatcagaataagggtaatcagactccttatgagtattttaatggtaaggataattctcgtgagtggcaggagtttaaggctcgtgttgagacttctcgttttcctcgttctaagaagcagcgtattcttcttcagaagtttgatgaggatggttttaaggagcgtaatcttaatgatactcgttatgttaatcgttttctttgtcagtttgttgctgatcgtatgcgtcttactggtaagggtaagaagcgtgtttttgcttctaatggtcagattactaatcttcttcgtggtttttggggtcttcgtaaggttcgtgctgagaatgatcgtcatcatgctcttgatgctgttgttgttgcttgttctactgttgctatgcagcagaagattactcgttttgttcgttataaggagatgaatgcttttgatggtaagactattgataaggagactggtgaggttcttcatcagaagactcattttcctcagccttgggagttttttgctcaggaggttatgattcgtgtttttggtaagcctgatggtaagcctgagtttgaggaggctgatactcctgagaagcttcgtactcttcttgctgagaagctttcttctcgtcctgaggctgttcatgagtatgttactcctctttttgtttctcgtgctcctaatcgtaagatgtctggtcagggtcatatggagactgttaagtctgctaagcgtcttgatgagggtgtttctgttcttcgtgttcctcttactcagcttaagcttaaggatcttgagaagatggttaatcgtgagcgtgagcctaagctttatgaggctcttaaggctcgtcttgaggctcataaggatgatcctgctaaggcttttgctgagcctttttataagtatgataaggctggtaatcgtactcagcaggttaaggctgttcgtgttgagcaggttcagaagactggtgtttgggttcgtaatcataatggtattgctgataatgctactatggttcgtgttgatgtttttgagaagggtgataagtattatcttgttcctatttattcttggcaggttgctaagggtattcttcctgatcgtgctgttgttgcttatgctgatgaggaggattggactgttattgatgagtcttttcgttttaagtttgttctttattctaatgatcttattaaggttcagcttaagaaggattcttttcttggttatttttctggtcttgatcgtgctactggtgctatttctcttcgtgagcatgatcttgagaagtctaagggtaaggatggtatgcatcgtattggtgttaagactgctctttcttttcagaagtatcagattgatgagatgggtaaggagattcgtccttgtcgtcttaagaagcgtcctcctgttcgt

SEQ ID NO: 129 - DNA, 3240 bp, synthetic construct
  misc_feature 1..3240: note = Synthetic: Exemplary coding sequence encoding Nme3Cas9 cleavase
  source 1..3240: mol_type = other DNA
gccgccttcaagcccaaccccatcaactacatcctgggcctggacatcggcatcgcctccgtgggctgggccatggtggagatcgacgaggaggagaaccccatccggctgatcgacctgggcgtgcgggtgttcgagcgggccgaggtgcccaagaccggcgactccctggccatggcccggcggctggcccggtccgtgcggcggctgacccggcggcgggcccaccggctgctgcgggcccggcggctgctgaagcgggagggcgtgctgcaggccgccgacttcgacgagaacggcctgatcaagtccctgcccaacaccccctggcagctgcgggccgccgccctggaccggaagctgacccccctggagtggtccgccgtgctgctgcacctgatcaagcaccggggctacctgtcccagcggaagaacgagggcgagaccgccgacaaggagctgggcgccctgctgaagggcgtggccgacaacgcccacgccctgcagaccggcgacttccggacccccgccgagctggccctgaacaagttcgagaaggagtgcggccacatccggaaccagcggggcgactactcccacaccttctcccggaaggacctgcaggccgagctgaacctgctgttcgagaagcagaaggagttcggcaacccccacgtgtccggcggcctgaaggagggcatcgagaccctgctgatgacccagcggcccgccctgtccggcgacgccgtgcagaagatgctgggccactgcaccttcgagcccgccgagcccaaggccgccaagaacacctacaccgccgagcggttcatctggctgaccaagctgaacaacctgcggatcctggagcagggctccgagcggcccctgaccgacaccgagcgggccaccctgatggacgagccctaccggaagtccaagctgacctacgcccaggcccggaagctgctgtccctggaggacaccgccttcttcaagggcctgcggtacggcaaggacaacgccgaggcctccaccctgatggagatgaaggcctaccacaccatctcccgggccctggagaaggagggcctgaaggacaagaagtcccccctgaacctgtcccccgagctgcaggacgagatcggcaccgccttctccctgttcaagaccgacgaggacatcaccggccggctgaaggaccggatccagcccgagatcctggaggccctgctgaagcacatctccttcgacaagttcgtgcagatctccctgaaggccctgcggcggatcgtgcccctgatggagcagggcaagcggtacgacgaggcctgcgccgagatctacggcgaccactacggcaagaagaacaccgaggagaagatctacctgccccccatccccgccgacgagatccggaaccccgtggtgctgcgggccctgtcccaggcccggaaggtgatcaacggcgtggtgcggcggtacggctcccccgcccggatccacatcgagaccgcccgggaggtgggcaagtccttcaaggaccggaaggagatcgagaagcggcaggaggagaaccggaaggaccgggagaaggccgccgccaagttccgggagtacttccccaacttcgtgggcgagcccaagtccaaggacatcctgaagctgcggctgtacgagcagcagcacggcaagtgcctgtactccggcaaggagatcaacctgggccggctgaacgagaagggctacgtggagatcgaccacgccctgcccttctcccggacctgggacgactccttcaacaacaaggtgctggtgctgggctccgagaaccagaacaagggcaaccagaccccctacgagtacttcaacggcaaggacaactcccgggagtggcaggagttcaaggcccgggtggagacctcccggttcccccggtccaagaagcagcggatcctgctgcagaagttcgacgaggacggcttcaaggagcggaacctgaacgacacccggtacgtgaaccggttcctgtgccagttcgtggccgaccggatgcggctgaccggcaagggcaagaagcgggtgttcgcctccaacggccagatcaccaacctgctgcggggcttctggggcctgcggaaggtgcgggccgagaacgaccggcaccacgccctggacgccgtggtggtggcctgctccaccgtggccatgcagcagaagatcacccggttcgtgcggtacaaggagatgaacgccttcgacggcaagaccatcgacaaggagaccggcgaggtgctgcaccagaagacccacttcccccagccctgggagttcttcgcccaggaggtgatgatccgggtgttcggcaagcccgacggcaagcccgagttcgaggaggccgacacccccgagaagctgcggaccctgctggccgagaagctgtcctcccggcccgaggccgtgcacgagtacgtgacccccctgttcgtgtcccgggcccccaaccggaagatgtccggccagggccacatggagaccgtgaagtccgccaagcggctggacgagggcgtgtccgtgctgcgggtgcccctgacccagctgaagctgaaggacctggagaagatggtgaaccgggagcgggagcccaagctgtacgaggccctgaaggcccggctggaggcccacaaggacgaccccgccaaggccttcgccgagcccttctacaagtacgacaaggccggcaaccggacccagcaggtgaaggccgtgcgggtggagcaggtgcagaagaccggcgtgtgggtgcggaaccacaacggcatcgccgacaacgccaccatggtgcgggtggacgtgttcgagaagggcgacaagtactacctggtgcccatctactcctggcaggtggccaagggcatcctgcccgaccgggccgtggtggcctacgccgacgaggaggactggaccgtgatcgacgagtccttccggttcaagttcgtgctgtactccaacgacctgatcaaggtgcagctgaagaaggactccttcctgggctacttctccggcctggaccgggccaccggcgccatctccctgcgggagcacgacctggagaagtccaagggcaaggacggcatgcaccggatcggcgtgaagaccgccctgtccttccagaagtaccagatcgacgagatgggcaaggagatccggccctgccggctgaagaagcggccccccgtgcgg

SEQ ID NO: 130 - DNA, 3240 bp, synthetic construct
  misc_feature 1..3240: note = Synthetic: Exemplary coding sequence encoding Nme3Cas9 cleavase
  source 1..3240: mol_type = other DNA
gcagcattcaaaccaaacccaatcaactacatcctaggactagacatcggaatcgcatcagtaggatgagcaatggtagaaatcgacgaagaagaaaacccaatccgactaatcgacctaggagtacgagtattcgaacgagcagaagtaccaaaaacaggagactcactagcaatggcacgacgactagcacgatcagtacgacgactaacacgacgacgagcacaccgactactacgagcacgacgactactaaaacgagaaggagtactacaagcagcagacttcgacgaaaacggactaatcaaatcactaccaaacacaccatgacaactacgagcagcagcactagaccgaaaactaacaccactagaatgatcagcagtactactacacctaatcaaacaccgaggatacctatcacaacgaaaaaacgaaggagaaacagcagacaaagaactaggagcactactaaaaggagtagcagacaacgcacacgcactacaaacaggagacttccgaacaccagcagaactagcactaaacaaattcgaaaaagaatgcggacacatccgaaaccaacgaggagactactcacacacattctcacgaaaagacctacaagcagaactaaacctactattcgaaaaacaaaaagaattcggaaacccacacgtatcaggaggactaaaagaaggaatcgaaacactactaatgacacaacgaccagcactatcaggagacgcagtacaaaaaatgctaggacactgcacattcgaaccagcagaaccaaaagcagcaaaaaacacatacacagcagaacgattcatctgactaacaaaactaaacaacctacgaatcctagaacaaggatcagaacgaccactaacagacacagaacgagcaacactaatggacgaaccataccgaaaatcaaaactaacatacgcacaagcacgaaaactactatcactagaagacacagcattcttcaaaggactacgatacggaaaagacaacgcagaagcatcaacactaatggaaatgaaagcataccacacaatctcacgagcactagaaaaagaaggactaaaagacaaaaaatcaccactaaacctatcaccagaactacaagacgaaatcggaacagcattctcactattcaaaacagacgaagacatcacaggacgactaaaagaccgaatccaaccagaaatcctagaagcactactaaaacacatctcattcgacaaattcgtacaaatctcactaaaagcactacgacgaatcgtaccactaatggaacaaggaaaacgatacgacgaagcatgcgcagaaatctacggagaccactacggaaaaaaaaacacagaagaaaaaatctacctaccaccaatcccagcagacgaaatccgaaacccagtagtactacgagcactatcacaagcacgaaaagtaatcaacggagtagtacgacgatacggatcaccagcacgaatccacatcgaaacagcacgagaagtaggaaaatcattcaaagaccgaaaagaaatcgaaaaacgacaagaagaaaaccgaaaagaccgagaaaaagcagcagcaaaattccgagaatacttcccaaacttcgtaggagaaccaaaatcaaaagacatcctaaaactacgactatacgaacaacaacacggaaaatgcctatactcaggaaaagaaatcaacctaggacgactaaacgaaaaaggatacgtagaaatcgaccacgcactaccattctcacgaacatgagacgactcattcaacaacaaagtactagtactaggatcagaaaaccaaaacaaaggaaaccaaacaccatacgaatacttcaacggaaaagacaactcacgagaatgacaagaattcaaagcacgagtagaaacatcacgattcccacgatcaaaaaaacaacgaatcctactacaaaaattcgacgaagacggattcaaagaacgaaacctaaacgacacacgatacgtaaaccgattcctatgccaattcgtagcagaccgaatgcgactaacaggaaaaggaaaaaaacgagtattcgcatcaaacggacaaatcacaaacctactacgaggattctgaggactacgaaaagtacgagcagaaaacgaccgacaccacgcactagacgcagtagtagtagcatgctcaacagtagcaatgcaacaaaaaatcacacgattcgtacgatacaaagaaatgaacgcattcgacggaaaaacaatcgacaaagaaacaggagaagtactacaccaaaaaacacacttcccacaaccatgagaattcttcgcacaagaagtaatgatccgagtattcggaaaaccagacggaaaaccagaattcgaagaagcagacacaccagaaaaactacgaacactactagcagaaaaactatcatcacgaccagaagcagtacacgaatacgtaacaccactattcgtatcacgagcaccaaaccgaaaaatgtcaggacaaggacacatggaaacagtaaaatcagcaaaacgactagacgaaggagtatcagtactacgagtaccactaacacaactaaaactaaaagacctagaaaaaatggtaaaccgagaacgagaaccaaaactatacgaagcactaaaagcacgactagaagcacacaaagacgacccagcaaaagcattcgcagaaccattctacaaatacgacaaagcaggaaaccgaacacaacaagtaaaagcagtacgagtagaacaagtacaaaaaacaggagtatgagtacgaaaccacaacggaatcgcagacaacgcaacaatggtacgagtagacgtattcgaaaaaggagacaaatactacctagtaccaatctactcatgacaagtagcaaaaggaatcctaccagaccgagcagtagtagcatacgcagacgaagaagactgaacagtaatcgacgaatcattccgattcaaattcgtactatactcaaacgacctaatcaaagtacaactaaaaaaagactcattcctaggatacttctcaggactagaccgagcaacaggagcaatctcactacgagaacacgacctagaaaaatcaaaaggaaaagacggaatgcaccgaatcggagtaaaaacagcactatcattccaaaaataccaaatcgacgaaatgggaaaagaaatccgaccatgccgactaaaaaaacgaccaccagtacga

SEQ ID NO: 131 - DNA, 3246 bp, synthetic construct
  misc_feature 1..3246: note = Synthetic: Exemplary open reading frame for Nme3Cas9 cleavase
  modified_base 3244: mod_base = OTHER; note = uracil
  source 1..3246: mol_type = other DNA
atggctgcttttaagcctaatcctattaattatattcttggtcttgatattggtattgcttctgttggttgggctatggttgagattgatgaggaggagaatcctattcgtcttattgatcttggtgttcgtgtttttgagcgtgctgaggttcctaagactggtgattctcttgctatggctcgtcgtcttgctcgttctgttcgtcgtcttactcgtcgtcgtgctcatcgtcttcttcgtgctcgtcgtcttcttaagcgtgagggtgttcttcaggctgctgattttgatgagaatggtcttattaagtctcttcctaatactccttggcagcttcgtgctgctgctcttgatcgtaagcttactcctcttgagtggtctgctgttcttcttcatcttattaagcatcgtggttatctttctcagcgtaagaatgagggtgagactgctgataaggagcttggtgctcttcttaagggtgttgctgataatgctcatgctcttcagactggtgattttcgtactcctgctgagcttgctcttaataagtttgagaaggagtgtggtcatattcgtaatcagcgtggtgattattctcatactttttctcgtaaggatcttcaggctgagcttaatcttctttttgagaagcagaaggagtttggtaatcctcatgtttctggtggtcttaaggagggtattgagactcttcttatgactcagcgtcctgctctttctggtgatgctgttcagaagatgcttggtcattgtacttttgagcctgctgagcctaaggctgctaagaatacttatactgctgagcgttttatttggcttactaagcttaataatcttcgtattcttgagcagggttctgagcgtcctcttactgatactgagcgtgctactcttatggatgagccttatcgtaagtctaagcttacttatgctcaggctcgtaagcttctttctcttgaggatactgctttttttaagggtcttcgttatggtaaggataatgctgaggcttctactcttatggagatgaaggcttatcatactatttctcgtgctcttgagaaggagggtcttaaggataagaagtctcctcttaatctttctcctgagcttcaggatgagattggtactgctttttctctttttaagactgatgaggatattactggtcgtcttaaggatcgtattcagcctgagattcttgaggctcttcttaagcatatttcttttgataagtttgttcagatttctcttaaggctcttcgtcgtattgttcctcttatggagcagggtaagcgttatgatgaggcttgtgctgagatttatggtgatcattatggtaagaagaatactgaggagaagatttatcttcctcctattcctgctgatgagattcgtaatcctgttgttcttcgtgctctttctcaggctcgtaaggttattaatggtgttgttcgtcgttatggttctcctgctcgtattcatattgagactgctcgtgaggttggtaagtcttttaaggatcgtaaggagattgagaagcgtcaggaggagaatcgtaaggatcgtgagaaggctgctgctaagtttcgtgagtattttcctaattttgttggtgagcctaagtctaaggatattcttaagcttcgtctttatgagcagcagcatggtaagtgtctttattctggtaaggagattaatcttggtcgtcttaatgagaagggttatgttgagattgatcatgctcttcctttttctcgtacttgggatgattcttttaataataaggttcttgttcttggttctgagaatcagaataagggtaatcagactccttatgagtattttaatggtaaggataattctcgtgagtggcaggagtttaaggctcgtgttgagacttctcgttttcctcgttctaagaagcagcgtattcttcttcagaagtttgatgaggatggttttaaggagcgtaatcttaatgatactcgttatgttaatcgttttctttgtcagtttgttgctgatcgtatgcgtcttactggtaagggtaagaagcgtgtttttgcttctaatggtcagattactaatcttcttcgtggtttttggggtcttcgtaaggttcgtgctgagaatgatcgtcatcatgctcttgatgctgttgttgttgcttgttctactgttgctatgcagcagaagattactcgttttgttcgttataaggagatgaatgcttttgatggtaagactattgataaggagactggtgaggttcttcatcagaagactcattttcctcagccttgggagttttttgctcaggaggttatgattcgtgtttttggtaagcctgatggtaagcctgagtttgaggaggctgatactcctgagaagcttcgtactcttcttgctgagaagctttcttctcgtcctgaggctgttcatgagtatgttactcctctttttgtttctcgtgctcctaatcgtaagatgtctggtcagggtcatatggagactgttaagtctgctaagcgtcttgatgagggtgtttctgttcttcgtgttcctcttactcagcttaagcttaaggatcttgagaagatggttaatcgtgagcgtgagcctaagctttatgaggctcttaaggctcgtcttgaggctcataaggatgatcctgctaaggcttttgctgagcctttttataagtatgataaggctggtaatcgtactcagcaggttaaggctgttcgtgttgagcaggttcagaagactggtgtttgggttcgtaatcataatggtattgctgataatgctactatggttcgtgttgatgtttttgagaagggtgataagtattatcttgttcctatttattcttggcaggttgctaagggtattcttcctgatcgtgctgttgttgcttatgctgatgaggaggattggactgttattgatgagtcttttcgttttaagtttgttctttattctaatgatcttattaaggttcagcttaagaaggattcttttcttggttatttttctggtcttgatcgtgctactggtgctatttctcttcgtgagcatgatcttgagaagtctaagggtaaggatggtatgcatcgtattggtgttaagactgctctttcttttcagaagtatcagattgatgagatgggtaaggagattcgtccttgtcgtcttaagaagcgtcctcctgttcgttga

SEQ ID NO: 132 - DNA, 3246 bp, synthetic construct
  misc_feature 1..3246: note = Synthetic: Exemplary open reading frame for Nme3Cas9 cleavase
  modified_base 3244: mod_base = OTHER; note = uracil
  source 1..3246: mol_type = other DNA
atggccgccttcaagcccaaccccatcaactacatcctgggcctggacatcggcatcgcctccgtgggctgggccatggtggagatcgacgaggaggagaaccccatccggctgatcgacctgggcgtgcgggtgttcgagcgggccgaggtgcccaagaccggcgactccctggccatggcccggcggctggcccggtccgtgcggcggctgacccggcggcgggcccaccggctgctgcgggcccggcggctgctgaagcgggagggcgtgctgcaggccgccgacttcgacgagaacggcctgatcaagtccctgcccaacaccccctggcagctgcgggccgccgccctggaccggaagctgacccccctggagtggtccgccgtgctgctgcacctgatcaagcaccggggctacctgtcccagcggaagaacgagggcgagaccgccgacaaggagctgggcgccctgctgaagggcgtggccgacaacgcccacgccctgcagaccggcgacttccggacccccgccgagctggccctgaacaagttcgagaaggagtgcggccacatccggaaccagcggggcgactactcccacaccttctcccggaaggacctgcaggccgagctgaacctgctgttcgagaagcagaaggagttcggcaacccccacgtgtccggcggcctgaaggagggcatcgagaccctgctgatgacccagcggcccgccctgtccggcgacgccgtgcagaagatgctgggccactgcaccttcgagcccgccgagcccaaggccgccaagaacacctacaccgccgagcggttcatctggctgaccaagctgaacaacctgcggatcctggagcagggctccgagcggcccctgaccgacaccgagcgggccaccctgatggacgagccctaccggaagtccaagctgacctacgcccaggcccggaagctgctgtccctggaggacaccgccttcttcaagggcctgcggtacggcaaggacaacgccgaggcctccaccctgatggagatgaaggcctaccacaccatctcccgggccctggagaaggagggcctgaaggacaagaagtcccccctgaacctgtcccccgagctgcaggacgagatcggcaccgccttctccctgttcaagaccgacgaggacatcaccggccggctgaaggaccggatccagcccgagatcctggaggccctgctgaagcacatctccttcgacaagttcgtgcagatctccctgaaggccctgcggcggatcgtgcccctgatggagcagggcaagcggtacgacgaggcctgcgccgagatctacggcgaccactacggcaagaagaacaccgaggagaagatctacctgccccccatccccgccgacgagatccggaaccccgtggtgctgcgggccctgtcccaggcccggaaggtgatcaacggcgtggtgcggcggtacggctcccccgcccggatccacatcgagaccgcccgggaggtgggcaagtccttcaaggaccggaaggagatcgagaagcggcaggaggagaaccggaaggaccgggagaaggccgccgccaagttccgggagtacttccccaacttcgtgggcgagcccaagtccaaggacatcctgaagctgcggctgtacgagcagcagcacggcaagtgcctgtactccggcaaggagatcaacctgggccggctgaacgagaagggctacgtggagatcgaccacgccctgcccttctcccggacctgggacgactccttcaacaacaaggtgctggtgctgggctccgagaaccagaacaagggcaaccagaccccctacgagtacttcaacggcaaggacaactcccgggagtggcaggagttcaaggcccgggtggagacctcccggttcccccggtccaagaagcagcggatcctgctgcagaagttcgacgaggacggcttcaaggagcggaacctgaacgacacccggtacgtgaaccggttcctgtgccagttcgtggccgaccggatgcggctgaccggcaagggcaagaagcgggtgttcgcctccaacggccagatcaccaacctgctgcggggcttctggggcctgcggaaggtgcgggccgagaacgaccggcaccacgccctggacgccgtggtggtggcctgctccaccgtggccatgcagcagaagatcacccggttcgtgcggtacaaggagatgaacgccttcgacggcaagaccatcgacaaggagaccggcgaggtgctgcaccagaagacccacttcccccagccctgggagttcttcgcccaggaggtgatgatccgggtgttcggcaagcccgacggcaagcccgagttcgaggaggccgacacccccgagaagctgcggaccctgctggccgagaagctgtcctcccggcccgaggccgtgcacgagtacgtgacccccctgttcgtgtcccgggcccccaaccggaagatgtccggccagggccacatggagaccgtgaagtccgccaagcggctggacgagggcgtgtccgtgctgcgggtgcccctgacccagctgaagctgaaggacctggagaagatggtgaaccgggagcgggagcccaagctgtacgaggccctgaaggcccggctggaggcccacaaggacgaccccgccaaggccttcgccgagcccttctacaagtacgacaaggccggcaaccggacccagcaggtgaaggccgtgcgggtggagcaggtgcagaagaccggcgtgtgggtgcggaaccacaacggcatcgccgacaacgccaccatggtgcgggtggacgtgttcgagaagggcgacaagtactacctggtgcccatctactcctggcaggtggccaagggcatcctgcccgaccgggccgtggtggcctacgccgacgaggaggactggaccgtgatcgacgagtccttccggttcaagttcgtgctgtactccaacgacctgatcaaggtgcagctgaagaaggactccttcctgggctacttctccggcctggaccgggccaccggcgccatctccctgcgggagcacgacctggagaagtccaagggcaaggacggcatgcaccggatcggcgtgaagaccgccctgtccttccagaagtaccagatcgacgagatgggcaaggagatccggccctgccggctgaagaagcggccccccgtgcggtga

SEQ ID NO: 133 - DNA, 3246 bp, synthetic construct
  misc_feature 1..3246: note = Synthetic: Exemplary open reading frame for Nme3Cas9 cleavase
  modified_base 3244: mod_base = OTHER; note = uracil
  source 1..3246: mol_type = other DNA
atggcagcattcaaaccaaacccaatcaactacatcctaggactagacatcggaatcgcatcagtaggatgagcaatggtagaaatcgacgaagaagaaaacccaatccgactaatcgacctaggagtacgagtattcgaacgagcagaagtaccaaaaacaggagactcactagcaatggcacgacgactagcacgatcagtacgacgactaacacgacgacgagcacaccgactactacgagcacgacgactactaaaacgagaaggagtactacaagcagcagacttcgacgaaaacggactaatcaaatcactaccaaacacaccatgacaactacgagcagcagcactagaccgaaaactaacaccactagaatgatcagcagtactactacacctaatcaaacaccgaggatacctatcacaacgaaaaaacgaaggagaaacagcagacaaagaactaggagcactactaaaaggagtagcagacaacgcacacgcactacaaacaggagacttccgaacaccagcagaactagcactaaacaaattcgaaaaagaatgcggacacatccgaaaccaacgaggagactactcacacacattctcacgaaaagacctacaagcagaactaaacctactattcgaaaaacaaaaagaattcggaaacccacacgtatcaggaggactaaaagaaggaatcgaaacactactaatgacacaacgaccagcactatcaggagacgcagtacaaaaaatgctaggacactgcacattcgaaccagcagaaccaaaagcagcaaaaaacacatacacagcagaacgattcatctgactaacaaaactaaacaacctacgaatcctagaacaaggatcagaacgaccactaacagacacagaacgagcaacactaatggacgaaccataccgaaaatcaaaactaacatacgcacaagcacgaaaactactatcactagaagacacagcattcttcaaaggactacgatacggaaaagacaacgcagaagcatcaacactaatggaaatgaaagcataccacacaatctcacgagcactagaaaaagaaggactaaaagacaaaaaatcaccactaaacctatcaccagaactacaagacgaaatcggaacagcattctcactattcaaaacagacgaagacatcacaggacgactaaaagaccgaatccaaccagaaatcctagaagcactactaaaacacatctcattcgacaaattcgtacaaatctcactaaaagcactacgacgaatcgtaccactaatggaacaaggaaaacgatacgacgaagcatgcgcagaaatctacggagaccactacggaaaaaaaaacacagaagaaaaaatctacctaccaccaatcccagcagacgaaatccgaaacccagtagtactacgagcactatcacaagcacgaaaagtaatcaacggagtagtacgacgatacggatcaccagcacgaatccacatcgaaacagcacgagaagtaggaaaatcattcaaagaccgaaaagaaatcgaaaaacgacaagaagaaaaccgaaaagaccgagaaaaagcagcagcaaaattccgagaatacttcccaaacttcgtaggagaaccaaaatcaaaagacatcctaaaactacgactatacgaacaacaacacggaaaatgcctatactcaggaaaagaaatcaacctaggacgactaaacgaaaaaggatacgtagaaatcgaccacgcactaccattctcacgaacatgagacgactcattcaacaacaaagtactagtactaggatcagaaaaccaaaacaaaggaaaccaaacaccatacgaatacttcaacggaaaagacaactcacgagaatgacaagaattcaaagcacgagtagaaacatcacgattcccacgatcaaaaaaacaacgaatcctactacaaaaattcgacgaagacggattcaaagaacgaaacctaaacgacacacgatacgtaaaccgattcctatgccaattcgtagcagaccgaatgcgactaacaggaaaaggaaaaaaacgagtattcgcatcaaacggacaaatcacaaacctactacgaggattctgaggactacgaaaagtacgagcagaaaacgaccgacaccacgcactagacgcagtagtagtagcatgctcaacagtagcaatgcaacaaaaaatcacacgattcgtacgatacaaagaaatgaacgcattcgacggaaaaacaatcgacaaagaaacaggagaagtactacaccaaaaaacacacttcccacaaccatgagaattcttcgcacaagaagtaatgatccgagtattcggaaaaccagacggaaaaccagaattcgaagaagcagacacaccagaaaaactacgaacactactagcagaaaaactatcatcacgaccagaagcagtacacgaatacgtaacaccactattcgtatcacgagcaccaaaccgaaaaatgtcaggacaaggacacatggaaacagtaaaatcagcaaaacgactagacgaaggagtatcagtactacgagtaccactaacacaactaaaactaaaagacctagaaaaaatggtaaaccgagaacgagaaccaaaactatacgaagcactaaaagcacgactagaagcacacaaagacgacccagcaaaagcattcgcagaaccattctacaaatacgacaaagcaggaaaccgaacacaacaagtaaaagcagtacgagtagaacaagtacaaaaaacaggagtatgagtacgaaaccacaacggaatcgcagacaacgcaacaatggtacgagtagacgtattcgaaaaaggagacaaatactacctagtaccaatctactcatgacaagtagcaaaaggaatcctaccagaccgagcagtagtagcatacgcagacgaagaagactgaacagtaatcgacgaatcattccgattcaaattcgtactatactcaaacgacctaatcaaagtacaactaaaaaaagactcattcctaggatacttctcaggactagaccgagcaacaggagcaatctcactacgagaacacgacctagaaaaatcaaaaggaaaagacggaatgcaccgaatcggagtaaaaacagcactatcattccaaaaataccaaatcgacgaaatgggaaaagaaatccgaccatgccgactaaaaaaacgaccaccagtacgataa

SEQ ID NO: 134 - RNA, 3793 nt, synthetic construct
  misc_feature 1..3793: note = Synthetic: Exemplary coding sequence encoding Nme2Cas9 (mRNA AA)
  source 1..3793: mol_type = other RNA
gggaagctcagaataaacgctcaactttggccggatctgccaccatggacggctccggcggcggctcccccaagaagaagcggaaggtggaggacaagcggcccgccgccaccaagaaggccggccaggccaagaagaagaagggcggctccggcggcggcgccgccttcaagcccaaccccatcaactacatcctgggcctggacatcggcatcgcctccgtgggctgggccatggtggagatcgacgaggaggagaaccccatccggctgatcgacctgggcgtgcgggtgttcgagcgggccgaggtgcccaagaccggcgactccctggccatggcccggcggctggcccggtccgtgcggcggctgacccggcggcgggcccaccggctgctgcgggcccggcggctgctgaagcgggagggcgtgctgcaggccgccgacttcgacgagaacggcctgatcaagtccctgcccaacaccccctggcagctgcgggccgccgccctggaccggaagctgacccccctggagtggtccgccgtgctgctgcacctgatcaagcaccggggctacctgtcccagcggaagaacgagggcgagaccgccgacaaggagctgggcgccctgctgaagggcgtggccaacaacgcccacgccctgcagaccggcgacttccggacccccgccgagctggccctgaacaagttcgagaaggagtccggccacatccggaaccagcggggcgactactcccacaccttctcccggaaggacctgcaggccgagctgatcctgctgttcgagaagcagaaggagttcggcaacccccacgtgtccggcggcctgaaggagggcatcgagaccctgctgatgacccagcggcccgccctgtccggcgacgccgtgcagaagatgctgggccactgcaccttcgagcccgccgagcccaaggccgccaagaacacctacaccgccgagcggttcatctggctgaccaagctgaacaacctgcggatcctggagcagggctccgagcggcccctgaccgacaccgagcgggccaccctgatggacgagccctaccggaagtccaagctgacctacgcccaggcccggaagctgctgggcctggaggacaccgccttcttcaagggcctgcggtacggcaaggacaacgccgaggcctccaccctgatggagatgaaggcctaccacgccatctcccgggccctggagaaggagggcctgaaggacaagaagtcccccctgaacctgtcctccgagctgcaggacgagatcggcaccgccttctccctgttcaagaccgacgaggacatcaccggccggctgaaggaccgggtgcagcccgagatcctggaggccctgctgaagcacatctccttcgacaagttcgtgcagatctccctgaaggccctgcggcggatcgtgcccctgatggagcagggcaagcggtacgacgaggcctgcgccgagatctacggcgaccactacggcaagaagaacaccgaggagaagatctacctgccccccatccccgccgacgagatccggaaccccgtggtgctgcgggccctgtcccaggcccggaaggtgatcaacggcgtggtgcggcggtacggctcccccgcccggatccacatcgagaccgcccgggaggtgggcaagtccttcaaggaccggaaggagatcgagaagcggcaggaggagaaccggaaggaccgggagaaggccgccgccaagttccgggagtacttccccaacttcgtgggcgagcccaagtccaaggacatcctgaagctgcggctgtacgagcagcagcacggcaagtgcctgtactccggcaaggagatcaacctggtgcggctgaacgagaagggctacgtggagatcgaccacgccctgcccttctcccggacctgggacgactccttcaacaacaaggtgctggtgctgggctccgagaaccagaacaagggcaaccagaccccctacgagtacttcaacggcaaggacaactcccgggagtggcaggagttcaaggcccgggtggagacctcccggttcccccggtccaagaagcagcggatcctgctgcagaagttcgacgaggacggcttcaaggagtgcaacctgaacgacacccggtacgtgaaccggttcctgtgccagttcgtggccgaccacatcctgctgaccggcaagggcaagcggcgggtgttcgcctccaacggccagatcaccaacctgctgcggggcttctggggcctgcggaaggtgcgggccgagaacgaccggcaccacgccctggacgccgtggtggtggcctgctccaccgtggccatgcagcagaagatcacccggttcgtgcggtacaaggagatgaacgccttcgacggcaagaccatcgacaaggagaccggcaaggtgctgcaccagaagacccacttcccccagccctgggagttcttcgcccaggaggtgatgatccgggtgttcggcaagcccgacggcaagcccgagttcgaggaggccgacacccccgagaagctgcggaccctgctggccgagaagctgtcctcccggcccgaggccgtgcacgagtacgtgacccccctgttcgtgtcccgggcccccaaccggaagatgtccggcgcccacaaggacaccctgcggtccgccaagcggttcgtgaagcacaacgagaagatctccgtgaagcgggtgtggctgaccgagatcaagctggccgacctggagaacatggtgaactacaagaacggccgggagatcgagctgtacgaggccctgaaggcccggctggaggcctacggcggcaacgccaagcaggccttcgaccccaaggacaaccccttctacaagaagggcggccagctggtgaaggccgtgcgggtggagaagacccaggagtccggcgtgctgctgaacaagaagaacgcctacaccatcgccgacaacggcgacatggtgcgggtggacgtgttctgcaaggtggacaagaagggcaagaaccagtacttcatcgtgcccatctacgcctggcaggtggccgagaacatcctgcccgacatcgactgcaagggctaccggatcgacgactcctacaccttctgcttctccctgcacaagtacgacctgatcgccttccagaaggacgagaagtccaaggtggagttcgcctactacatcaactgcgactcctccaacggccggttctacctggcctggcacgacaagggctccaaggagcagcagttccggatctccacccagaacctggtgctgatccagaagtaccaggtgaacgagctgggcaaggagatccggccctgccggctgaagaagcggccccccgtgcggtagctagcaccagcctcaagaacacccgaatggagtctctaagctacataataccaacttacactttacaaaatgttgtcccccaaaatgtagccattcgtatctgctcctaataaaaagaaagtttcttcacattctcaaaaaaaaaaaaaaaaaaaaaaaaaaaaaaaaaaaaaaaaaaaaaaaaaaaaaaaaaaaaaaaaaaaaaaaaaaaaaaaaaaaaaaaaaaaaaaaaaaaaaaaaaaaaaaaaaaaaaaaaaaaaaaaaaaaaaaaaaaaaaaaaaaaaaaaaaaaaaaaaaaaaaaaaaaaaaaaaaaaaaaaaaaaaaaaaaaaaaaaaaaaaaaaaaaaaaaaaaaaaaaaaaaaaaaaaaaaaaaaaaaaaaaaaaa

SEQ ID NO: 135 - RNA, 3684 nt, synthetic construct
  misc_feature 1..3684: note = Synthetic: Exemplary coding sequence encoding Nme1Cas9 (mRNA AB)
  source 1..3684: mol_type = other RNA
gggtcccgcagtcggcgtccagcggctctgcttgttcgtgtgtgtgtcgttgcaggccttattcggatccgccaccatggcagcattcaagccgaactcgatcaactacatcctgggactggacatcggaatcgcatcggtcggatgggcaatggtcgaaatcgacgaagaagaaaacccgatcagactgatcgacctgggagtcagagtcttcgaaagagcagaagtcccgaagacaggagactcgctggcaatggcaagaagactggcaagatcggtcagaagactgacaagaagaagagcacacagactgctgagaacaagaagactgctgaagagagaaggagtcctgcaggcagcaaacttcgacgaaaacggactgatcaagtcgctgccgaacacaccgtggcagctgagagcagcagcactggacagaaagctgacaccgctggaatggtcggcagtcctgctgcacctgatcaagcacagaggatacctgtcgcagagaaagaacgaaggagaaacagcagacaaggaactgggagcactgctgaagggagtcgcaggaaacgcacacgcactgcagacaggagacttcagaacaccggcagaactggcactgaacaagttcgaaaaggaatcgggacacatcagaaaccagagatcggactactcgcacacattctcgagaaaggacctgcaggcagaactgatcctgctgttcgaaaagcagaaggaattcggaaacccgcacgtctcgggaggactgaaggaaggaatcgaaacactgctgatgacacagagaccggcactgtcgggagacgcagtccagaagatgctgggacactgcacattcgaaccggcagaaccgaaggcagcaaagaacacatacacagcagaaagattcatctggctgacaaagctgaacaacctgagaatcctggaacagggatcggaaagaccgctgacagacacagaaagagcaacactgatggacgaaccgtacagaaagtcgaagctgacatacgcacaggcaagaaagctgctgggactggaagacacagcattcttcaagggactgagatacggaaaggacaacgcagaagcatcgacactgatggaaatgaaggcataccacgcaatctcgagagcactggaaaaggaaggactgaaggacaagaagtcgccgctgaacctgtcgccggaactgcaggacgaaatcggaacagcattctcgctgttcaagacagacgaagacatcacaggaagactgaaggacagaatccagccggaaatcctggaagcactgctgaagcacatctcgttcgacaagttcgtccagatctcgctgaaggcactgagaagaatcgtcccgctgatggaacagggaaagagatacgacgaagcatgcgcagaaatctacggagaccactacggaaagaagaacacagaagaaaagatctacctgccgccgatcccggcagacgaaatcagaaacccggtcgtcctgagagcactgtcgcaggcaagaaaggtcatcaacggagtcgtcagaagatacggatcgccggcaagaatccacatcgaaacagcaagagaagtcggaaagtcgttcaaggacagaaaggaaatcgaaaagagacaggaagaaaacagaaaggacagagaaaaggcagcagcaaagttcagagaatacttcccgaacttcgtcggagaaccgaagtcgaaggacatcctgaagctgagactgtacgaacagcagcacggaaagtgcctgtactcgggaaaggaaatcaacctgggaagactgaacgaaaagggatacgtcgaaatcgaccacgcactgccgttctcgagaacatgggacgactcgttcaacaacaaggtcctggtcctgggatcggaaaaccagaacaagggaaaccagacaccgtacgaatacttcaacggaaaggacaactcgagagaatggcaggaattcaaggcaagagtcgaaacatcgagattcccgagatcgaagaagcagagaatcctgctgcagaagttcgacgaagacggattcaaggaaagaaacctgaacgacacaagatacgtcaacagattcctgtgccagttcgtcgcagacagaatgagactgacaggaaagggaaagaagagagtcttcgcatcgaacggacagatcacaaacctgctgagaggattctggggactgagaaaggtcagagcagaaaacgacagacaccacgcactggacgcagtcgtcgtcgcatgctcgacagtcgcaatgcagcagaagatcacaagattcgtcagatacaaggaaatgaacgcattcgacggaaagacaatcgacaaggaaacaggagaagtcctgcaccagaagacacacttcccgcagccgtgggaattcttcgcacaggaagtcatgatcagagtcttcggaaagccggacggaaagccggaattcgaagaagcagacacactggaaaagctgagaacactgctggcagaaaagctgtcgtcgagaccggaagcagtccacgaatacgtcacaccgctgttcgtctcgagagcaccgaacagaaagatgtcgggacagggacacatggaaacagtcaagtcggcaaagagactggacgaaggagtctcggtcctgagagtcccgctgacacagctgaagctgaaggacctggaaaagatggtcaacagagaaagagaaccgaagctgtacgaagcactgaaggcaagactggaagcacacaaggacgacccggcaaaggcattcgcagaaccgttctacaagtacgacaaggcaggaaacagaacacagcaggtcaaggcagtcagagtcgaacaggtccagaagacaggagtctgggtcagaaaccacaacggaatcgcagacaacgcaacaatggtcagagtagacgtcttcgaaaagggagacaagtactacctggtcccgatctactcgtggcaggtcgcaaagggaatcctgccggacagagcagtcgtccagggaaaggacgaagaagactggcagctgatcgacgactcgttcaacttcaagttctcgctgcacccgaacgacctggtcgaagtcatcacaaagaaggcaagaatgttcggatacttcgcatcgtgccacagaggaacaggaaacatcaacatcagaatccacgacctggaccacaagatcggaaagaacggaatcctggaaggaatcggagtcaagacagcactgtcgttccagaagtaccagatcgacgaactgggaaaggaaatcagaccgtgcagactgaagaagagaccgccggtcagatccggaaagagaacagcagacggatcggaattcgaatcgccgaagaagaagagaaaggtcgaatgatagctagccatcacatttaaaagcatctcagcctaccatgagaataagagaaagaaaatgaagatcaatagcttattcatctctttttctttttcgttggtgtaaagccaacaccctgtctaaaaaacataaatttctttaatcattttgcctcttttctctgtgcttcaattaataaaaaatggaaagaacctcgagaaaaaaaaaaaaaaaaaaaaaaaaaaaaaaaaaaaaaaaaaaaaaaaaaaaaaaaaaaaaaaaaaaaaaaaaaaaaaaaaaaaaaaaaaaaaatctag

SEQ ID NO: 136 - protein, 1120 aa, synthetic construct; identical to SEQ ID NO: 16
  REGION 1..1120: note = Synthetic: Exemplary amino acid sequence for Nme2Cas9 (mRNA AA amino acid)

SEQ ID NO: 137 - protein, 1103 aa, synthetic construct; identical to SEQ ID NO: 107
  REGION 1..1103: note = Synthetic: Exemplary amino acid sequence for Nme1Cas9 (mRNA AB amino acid)

SEQ ID NO: 138 - RNA, 3363 nt, synthetic construct; identical to SEQ ID NO: 15
  misc_feature 1..3363: note = Synthetic: Exemplary open reading frame for Nme2Cas9 (mRNA AA ORF)
  source 1..3363: mol_type = other RNA

SEQ ID NO: 139 - RNA, 3312 nt, synthetic construct; identical to SEQ ID NO: 106
  misc_feature 1..3312: note = Synthetic: Exemplary open reading frame for Nme1Cas9 (mRNA AB ORF)
  source 1..3312: mol_type = other RNA

SEQ ID NO: 140 - RNA, 3192 nt, synthetic construct
  misc_feature 1..3192: note = Synthetic: WT Smu Cas9 coding sequence
  source 1..3192: mol_type = other RNA
atggaaaaatttcactatgtattgggtttggatttgggtatcgcctctgtggggtgggctgccattgaaattgacaaggaaaccgaaacatcaatcggtttattggattgcggtgtcagaacatttgaacgtgcagaagtacccaaaacaggcgattctcttgccaaagctcgccgtgaagccagaagtactcgccgtttaattcgcagacgttcgcatcgcttattacgtttaaaacgtttattgaaacgtgaaattttcaggcagcctgaaacgtttaaagacttaccaatcaatgcttggcaattgcgtgttaaaggcttggatagtcggttgaatgaatatgaatgggcggccgttttattgcatttggtgaagcatcgcggttatttatcgcaacgcaaaagcgaaatgagcgaaacagacagcaaatctgaaatgggcagattactggcaggtgtggcggaaaatcaccaacttttacaacaagaacaatatcgtacaccagccgaattagcactcaaaaaatttgtgaaacattttcgcaataaaggtggcgattatgcacacactttcaaccgtttggatttgcaagccgaattgcatttattgtttcaaaaacaacgtgaattaggcaatccattcacttcaccagaattggaacggcaagttgatgatttgttgatgacgcagcgcagtgctttacaaggtgatgcgattttgaaaatgttgggtcattgtgggtttgaacctgaacaattcaaagcagcgaaaaacacattcagtgccgaacgttttatttggttgacaaaactcaataatcttcgcattcaagaccaaggcaaagaacgtgcgttaactgccgatgagcgtaccaaattgttggacgagccttataaaaaaagtaaattgacttacgcacaagttcgcaaattattaagcttgcctcaaactgctatttttaaaggtttgcgttatgatttggaacatgacaaaaaagcagaaaacagtacgttgatggaaatgaaatcctatcacaacatccgccaaacattggaaaaatcaggtttgaaaacagaatggcaaagtattgccacgcagcctgaaattttagatgcaattggcacggcgttttccatttataaaaccgatgaagatatttcgcatgaattaaaaacgtgcaggctgcctgaaaacgtattgaatgaattactgaaaaacatcaattttgatggattcattcaattatcgttgactgcattacgcaaaattttgcccttgatggaacaaggctaccgttatgatgaagcgtgtacccaaatttacggtaatcatcattcaggcagcttgcaacaagaatcaaagcaatttttgccacatattccgattgatgatgtccgaaatcctgtggtgttccgtactttgacccaagcaagaaaagtggtgaatgcgattattcgtcggtatggttcgccagctcgtgtgcatattgagatggcgcgtgaattgggtaagtctaaatcagaccgtgaccgaattgaaaaacaacaacaaaaaaataaaaaagaacgtgaaaacgcagtcgccaaattcaaagaagatttccctgattttgtgggcgaacccagagggaaagatattttgaaaatgcgtttgtatgaacaacaacacggcaaatgtttgtattcgggtcatgatattgatattaatcgattgaatgaaaaaggttatgttgaaattgaccatgccctgccattttcacggacttgggatgatagtcaaaataataaagttttggtacttggcagcgaaaaccaaaataaacgcaatcaaacgcctgatgaatatttggacggtgcaaacaatagccaacgttggcttgaatttcaagcgcgtgtacaaacttgtcatttttcttacggtaaaaaacaacgcattcaattagccaaattagacgatgaaaccgaaaaaggatttttagaacgcaatctaaatgatacgcggtatattgctcgttttatgtgtcaatttgtccaagaaaatttatatttgacaggtaaaggaaaacgtcttgtttttgcatcaaacggcggaatgaccgcaacattgagaaatttatggggtttgagaaaagtccgtgaagacaacgaccgccatcatgctcttgatgcgattgtggtggcgtgttccactgcttctatgcaacaaaaaataaccaaagcatttcaacgccatgaaagcattgaatatgtggataccgaaacgggcgaagtaaaatttcgtattccacagccttgggattttttccgtcaggaagtgatgattcgtgtgttcagcgaccaaccgtgtgaagatttggtagaaaaattgtcggctcgtcccgaagctttgcatgacaacgtaacgcctttatttgtctcgcgtgcaccaaatcgcaaaatgtcggggcaagggcatttggaaaccatcaaatctgcaaaaaggctgtctgaagaaaacagtatggttaaaaaaccattaaccacattgaaattaaaagatattccagaaatcgtaggctacccgagtcgtgaacctcaattgtatgccgcattgaaaacacgtttagaaacgcatgatgatgacccaattaaagcctttgccaaacccttttacaaacccaataaaaatggtgaattgggggcgttggttcgatcggtgcgtgtgaaaggtgtacaaaatacgggtgtaatggttcatgatggcaaaggcattgccgataatgccacaatggttcgtgttgatgtctataccaaagcgggcaaaaattaccttgttcctgtgtatgtttggcaggtggctcaaggaattttgccaaatcgggcggttacttctggcaaaagtgaagcagattgggatttaattgatgaaagttttgaatttaaattttcgctgtctcgtggggatttagtggaaatgattagcaataaaggaagaatttttggttattacaatgggttagatcgtgcaaatggaagtattgggattcgtgaacatgatttggaaaagtccaaaggaaaagatggtgttcatcgtgttggcgtgaaaaccgccaccgcattcaacaaataccacgttgacccacttggtaaagaaattcatcggtgttcatctgaaccacgccccacattaaaaatcaaatccaagaaataa

SEQ ID NO: 141 - DNA, 3189 bp, synthetic construct
  misc_feature 1..3189: note = Synthetic: human codon-optimized Smu coding sequence
  source 1..3189: mol_type = other DNA
atggagaagttccactacgtgctgggactggatctgggaatcgcaagcgtgggatgggcagcaatcgagatcgataaggagaccgagacatccatcggcctgctggactgcggcgtgaggacctttgagagggcagaggtgcctaagacaggcgacagcctggcaaaggcaaggagagaggcaaggtctacaaggcgcctgatccggagaaggagccacaggctgctgcggctgaagagactgctgaagcgggagatctttagacagccagagaccttcaaggatctgcccatcaacgcatggcagctgagggtgaagggactggactctcggctgaatgagtacgagtgggcagccgtgctgctgcacctggtgaagcacaggggctatctgagccagcgcaagtccgagatgtctgagaccgactctaagagcgagatgggcaggctgctggcaggagtggccgagaaccaccagctgctgcagcaggagcagtacaggaccccagcagagctggccctgaagaagtttgtgaagcacttccgcaacaagggcggcgattatgcccacacattcaataggctggacctgcaggcagagctgcacctgctgtttcagaagcagagagagctgggcaaccccttcacctctcctgagctggagcgccaggtggacgatctgctgatgacacagcggagcgccctgcagggcgatgcaatcctgaagatgctgggccactgtggctttgagcctgagcagttcaaggccgccaagaatacctttagcgccgagagattcatctggctgacaaagctgaacaatctgaggatccaggaccagggcaaggagagagccctgaccgccgatgagaggacaaagctgctggacgagccttacaagaagtctaagctgacctatgcccaggtgaggaagctgctgagcctgcctcagacagccatcttcaagggcctgcgctacgatctggagcacgacaagaaggccgagaactctaccctgatggagatgaagagctatcacaatatccggcagacactggagaagtccggcctgaagaccgagtggcagtctatcgccacacagccagagatcctggacgcaatcggaaccgccttttccatctacaagacagatgaggacatctctcacgagctgaagacctgcagactgcctgagaacgtgctgaatgagctgctgaagaacatcaattttgatggcttcatccagctgagcctgaccgccctgcgcaagatcctgccactgatggagcagggctaccggtatgacgaggcctgtacacagatctacggcaaccaccactccggctctctgcagcaggagtccaagcagtttctgcctcacatcccaatcgacgatgtgcggaacccagtggtgttcagaaccctgacacaggccaggaaggtggtgaatgccatcatccgccggtatggatctccagcaagggtgcacatcgagatggcaagggagctgggcaagagcaagtccgatagagacaggatcgagaagcagcagcagaagaacaagaaggagagggagaatgccgtggccaagttcaaggaggattttccagacttcgtgggagagcctaggggcaaggatatcctgaagatgcggctgtacgagcagcagcacggcaagtgcctgtattccggccacgatatcgacatcaaccggctgaatgagaagggctacgtggagatcgaccacgccctgccttttagcagaacctgggacgattcccagaacaataaggtgctggtgctgggcagcgagaaccagaataagcgcaatcagacaccagatgagtacctggacggcgccaacaattcccagagatggctggagtttcaggccagggtgcagacctgccacttctcttatggcaagaagcagaggatccagctggccaagctggacgatgagaccgagaagggcttcctggagcgcaacctgaatgatacaaggtacatcgcccggttcatgtgccagttcgtgcaggagaacctgtatctgaccggcaagggcaagcgcctggtgtttgcctccaacggcggcatgaccgccacactgcggaatctgtggggcctgaggaaggtgcgcgaggataatgacagacaccacgcactggacgcaatcgtggtggcatgcagcaccgcatccatgcagcagaagatcacaaaggcctttcagcggcacgagagcatcgagtatgtggataccgagacaggcgaggtgaagttcagaatcccccagccttgggacttctttcgccaggaagtgatgatccgggtgttttccgatcagccatgtgaggacctggtggagaagctgtctgccaggccagaggccctgcacgataacgtgacccctctgttcgtgagcagggcaccaaatagaaagatgtccggccagggccacctggagacaatcaagtccgccaagcgcctgtccgaggagaactctatggtgaagaagcccctgaccacactgaagctgaaggacatccctgagatcgtgggctacccatctagagagccccagctgtatgccgccctgaagaccaggctggagacacacgacgatgacccaatcaaggcctttgccaagcctttctacaagccaaacaagaatggagagctgggcgccctggtgcggtccgtgagagtgaagggcgtgcagaacacaggcgtgatggtgcacgatggcaagggcatcgccgacaatgccacaatggtgcgggtggacgtgtatacaaaggccggcaagaactacctggtgcccgtgtacgtgtggcaggtggcacagggaatcctgccaaatagagccgtgacctctggcaagagcgaggccgattgggacctgatcgatgagagcttcgagtttaagttctctctgagcagaggcgacctggtggagatgatctccaacaagggcaggatcttcggctactataacggcctggatagagccaatggcagcatcggcatcagggagcacgatctggagaagtccaagggcaaggacggagtgcacagggtgggagtgaagaccgcaacagcctttaataagtaccacgtggaccccctgggcaaggagatccacagatgtagctccgagccaaggcccaccctgaagatcaagagcaagaag

SEQ ID NO: 142 - protein, 1063 aa, synthetic construct
  REGION 1..1063: note = Synthetic: WT Smu Cas9 amino acid sequence
MEKFHYVLGLDLGIASVGWAAIEIDKETETSIGLLDCGVRTFERAEVPKTGDSLAKARREARSTRRLIRRRSHRLLRLKRLLKREIFRQPETFKDLPINAWQLRVKGLDSRLNEYEWAAVLLHLVKHRGYLSQRKSEMSETDSKSEMGRLLAGVAENHQLLQQEQYRTPAELALKKFVKHFRNKGGDYAHTFNRLDLQAELHLLFQKQRELGNPFTSPELERQVDDLLMTQRSALQGDAILKMLGHCGFEPEQFKAAKNTFSAERFIWLTKLNNLRIQDQGKERALTADERTKLLDEPYKKSKLTYAQVRKLLSLPQTAIFKGLRYDLEHDKKAENSTLMEMKSYHNIRQTLEKSGLKTEWQSIATQPEILDAIGTAFSIYKTDEDISHELKTCRLPENVLNELLKNINFDGFIQLSLTALRKILPLMEQGYRYDEACTQIYGNHHSGSLQQESKQFLPHIPIDDVRNPVVFRTLTQARKVVNAIIRRYGSPARVHIEMARELGKSKSDRDRIEKQQQKNKKERENAVAKFKEDFPDFVGEPRGKDILKMRLYEQQHGKCLYSGHDIDINRLNEKGYVEIDHALPFSRTWDDSQNNKVLVLGSENQNKRNQTPDEYLDGANNSQRWLEFQARVQTCHFSYGKKQRIQLAKLDDETEKGFLERNLNDTRYIARFMCQFVQENLYLTGKGKRLVFASNGGMTATLRNLWGLRKVREDNDRHHALDAIVVACSTASMQQKITKAFQRHESIEYVDTETGEVKFRIPQPWDFFRQEVMIRVFSDQPCEDLVEKLSARPEALHDNVTPLFVSRAPNRKMSGQGHLETIKSAKRLSEENSMVKKPLTTLKLKDIPEIVGYPSREPQLYAALKTRLETHDDDPIKAFAKPFYKPNKNGELGALVRSVRVKGVQNTGVMVHDGKGIADNATMVRVDVYTKAGKNYLVPVYVWQVAQGILPNRAVTSGKSEADWDLIDESFEFKFSLSRGDLVEMISNKGRIFGYYNGLDRANGSIGIREHDLEKSKGKDGVHRVGVKTATAFNKYHVDPLGKEIHRCSSEPRPTLKIKSKK

SEQ ID NO: 143 - DNA, 2955 bp, synthetic construct
  misc_feature 1..2955: note = Synthetic: WT Cje Cas9 coding sequence
  source 1..2955: mol_type = other DNA
atggcaagaattttggcatttgatataggaataagctctattggctgggcatttagtgaaaatgatgagttaaaagattgtggagttaggatttttacaaaggttgaaaatcccaaaacaggagaatccttagccttgccaagacgccttgcaagaagtgctagaaaacgccttgctagacgcaaagcaaggctaaatcacttaaaacatttaatcgcaaatgaatttaagttaaattacgaagattatcaaagctttgatgaaagtttagccaaggcttataaaggatctttaattagcccttatgagttaagatttagagctttaaacgagcttttaagtaagcaagattttgcaagagtgattttacatattgcaaaaaggcgtggctatgatgatattaaaaatagtgatgataaagaaaaaggtgcgattttaaaagctatcaagcaaaatgaagaaaaactagcaaattatcaaagtgtgggcgagtatctttataaagagtattttcaaaaattcaaagaaaattccaaagaatttacaaatgttagaaataaaaaagaaagttatgaacgctgcatagcgcaaagttttttaaaagatgaattaaagcttatttttaaaaaacaaagagaatttggcttttctttttcaaaaaaatttgaagaagaggtgcttagtgtagcattttataaaagggctttaaaagatttttctcatttggtgggaaattgtagtttttttaccgatgaaaaaagagcgccaaaaaattcgcccttagcttttatgtttgtagcacttacaagaattatcaatcttttaaacaatcttaaaaatactgaaggaattttatatacaaaagatgatttaaacgcccttttaaatgaagttttaaaaaacggcactctaacttataaacaaacaaaaaagcttttgggcttaagcgatgattatgaatttaaaggagaaaaaggaacttattttattgagtttaaaaaatacaaagaatttataaaagccctaggtgagcataatttaagccaagatgatttaaatgaaatagcaaaagatattactcttataaaagatgagattaaacttaaaaaggctttagcaaaatatgatttaaatcaaaatcaaattgatagtttaagcaaattggaatttaaagaccatttaaatataagttttaaagccttaaaacttgtcactcctttaatgcttgaaggtaaaaaatacgatgaagcttgcaatgagcttaatttaaaagtagcaatcaatgaagataaaaaagactttttacccgcatttaatgaaacttattacaaagatgaagtaactaatcctgtggttttaagggcgattaaagaatatagaaaggtcttaaatgccttacttaaaaaatacggtaaagtgcataaaataaacattgaattagcaagagaagtaggtaaaaatcacagccaaagagctaaaatagaaaaagagcaaaacgaaaactacaaggccaaaaaagacgccgaacttgaatgtgaaaaactaggcttaaaaataaatagcaaaaatattttaaaattaagattatttaaagaacaaaaagaattttgtgcttatagtggagaaaagattaaaattagtgatttgcaagatgaaaaaatgcttgaaattgatcacatttacccttattctagaagttttgatgattcttatatgaataaagttttagtttttaccaagcaaaatcaagaaaaacttaatcaaaccccctttgaagcctttggcaatgatagtgcaaaatggcagaaaattgaagttttagcaaaaaatttgcctactaaaaagcaaaaaagaattttagataaaaattacaaagacaaagagcaaaaaaactttaaagatagaaatctaaacgatactcgctacatagcaaggcttgttttaaactacactaaagattatttagattttttacctttaagcgatgatgaaaatacaaaattaaacgatacacaaaaaggctcaaaagtgcatgtagaagcaaaaagcggtatgcttacatcggctttaagacacacttggggctttagcgctaaggatagaaataaccatcttcatcacgccatcgatgcagtaattattgcttatgcaaacaactctatcgtaaaggctttttcagattttaaaaaagagcaagaaagcaacagtgcagaactttatgcaaaaaaaattagtgaattagattataaaaacaaaaggaagttttttgagccttttagtggttttaggcaaaaggttttagataaaattgatgaaatttttgtctcaaaacctgagagaaaaaagccaagtggagctttacatgaagaaacatttagaaaagaagaagaattctatcaatcatacggcggaaaagaaggagttttaaaagccctagagcttggtaaaatccgcaaagtaaatggtaaaatagttaaaaatggcgatatgtttagagtggatatttttaaacacaaaaagacaaataaattttatgctgtgccaatttatactatggattttgctttaaaagtattaccaaataaagctgtagcacgaagtaaaaaaggtgagataaaagactggattttaatggatgaaaattatgagttttgcttttctttatataaagatagtttgattttaattcaaactaaagatatgcaagagccagaatttgtttattataatgcttttacaagctctactgttagtttgattgtttcaaaacacgataataaatttgaaacgctaagcaaaaatcaaaaaatattgtttaaaaatgcaaatgaaaaagaagtaatcgcaaaaagcataggaattcaaaatctaaaagtatttgaaaaatacatagtttcagcacttggggaagttacaaaggctgagtttagacaaagagaagattttaaaaaatga

SEQ ID NO: 144 - protein, 984 aa, synthetic construct
  REGION 1..984: note = Synthetic: WT Cje Cas9 amino acid sequence
MARILAFDIGISSIGWAFSENDELKDCGVRIFTKVENPKTGESLALPRRLARSARKRLARRKARLNHLKHLIANEFKLNYEDYQSFDESLAKAYKGSLISPYELRFRALNELLSKQDFARVILHIAKRRGYDDIKNSDDKEKGAILKAIKQNEEKLANYQSVGEYLYKEYFQKFKENSKEFTNVRNKKESYERCIAQSFLKDELKLIFKKQREFGFSFSKKFEEEVLSVAFYKRALKDFSHLVGNCSFFTDEKRAPKNSPLAFMFVALTRIINLLNNLKNTEGILYTKDDLNALLNEVLKNGTLTYKQTKKLLGLSDDYEFKGEKGTYFIEFKKYKEFIKALGEHNLSQDDLNEIAKDITLIKDEIKLKKALAKYDLNQNQIDSLSKLEFKDHLNISFKALKLVTPLMLEGKKYDEACNELNLKVAINEDKKDFLPAFNETYYKDEVTNPVVLRAIKEYRKVLNALLKKYGKVHKINIELAREVGKNHSQRAKIEKEQNENYKAKKDAELECEKLGLKINSKNILKLRLFKEQKEFCAYSGEKIKISDLQDEKMLEIDHIYPYSRSFDDSYMNKVLVFTKQNQEKLNQTPFEAFGNDSAKWQKIEVLAKNLPTKKQKRILDKNYKDKEQKNFKDRNLNDTRYIARLVLNYTKDYLDFLPLSDDENTKLNDTQKGSKVHVEAKSGMLTSALRHTWGFSAKDRNNHLHHAIDAVIIAYANNSIVKAFSDFKKEQESNSAELYAKKISELDYKNKRKFFEPFSGFRQKVLDKIDEIFVSKPERKKPSGALHEETFRKEEEFYQSYGGKEGVLKALELGKIRKVNGKIVKNGDMFRVDIFKHKKTNKFYAVPIYTMDFALKVLPNKAVARSKKGEIKDWILMDENYEFCFSLYKDSLILIQTKDMQEPEFVYYNAFTSSTVSLIVSKHDNKFETLSKNQKILFKNANEKEVIAKSIGIQNLKVFEKYIVSALGEVTKAEFRQREDFKK

SEQ ID NO: 145-149 - skipped (5 entries)

SEQ ID NO: 150 - protein, 81 aa, synthetic construct
  REGION 1..81: note = Synthetic: Exemplary protein linker (81 aa)
GAPESATESGGTSTESEGSAGTSTESEGSAGSAGSTSTEEGTSTESEGSAGTSTESEGSAGTSESATESGGTSTESEGSSS

SEQ ID NO: 151 - protein, 71 aa, synthetic construct
  REGION 1..71: note = Synthetic: Exemplary protein linker (71 aa)
GAPESATESGGTSTESEGSAGTSTESEGSAGSAGSTSTEEGTSTESEGSAGTSTESEGSAGTSESATGSSS

SEQ ID NO: 152 - protein, 61 aa, synthetic construct
  REGION 1..61: note = Synthetic: Exemplary protein linker (61 aa)
GAPESATESGGTSTESEGSAGTSTESEGSAGSAGSTSTEEGTSTESEGSAGTSTESEGSSS

SEQ ID NO: 153 - protein, 51 aa, synthetic construct
  REGION 1..51: note = Synthetic: Exemplary protein linker (51 aa)
GAPESATESGGTSTESEGSAGTSTESEGSAGSAGSTSTEEGTSTESEGSSS

SEQ ID NO: 154 - protein, 41 aa, synthetic construct
  REGION 1..41: note = Synthetic: Exemplary protein linker (41 aa)
GAPESATESGGTSTESEGSAGTSTESEGSAGSAGSTSGSSS

SEQ ID NO: 155 - protein, 31 aa, synthetic construct
  REGION 1..31: note = Synthetic: Exemplary protein linker (31 aa)
GAPESATESGGTSTESEGSAGTSTESEGSSS

SEQ ID NO: 156 - protein, 21 aa, synthetic construct
  REGION 1..21: note = Synthetic: Exemplary protein linker (21 aa)
GAPESATESGGTSTESEGSSS

SEQ ID NO: 157 - protein, 11 aa, synthetic construct
  REGION 1..11: note = Synthetic: Exemplary protein linker (11 aa)
GAPESATGSSS

SEQ ID NO: 158 - protein, 81 aa, synthetic construct
  REGION 1..81: note = Synthetic: Exemplary protein linker (81 aa)
GAPESATESGGTSTESEGSAGTSTESEGSAGSAGSTSGGSGGGSGGSGSAGTSTESEGSAGTSESATESGGTSTESEGSSS

SEQ ID NO: 159 - RNA, 22 nt, synthetic construct
  misc_feature 1..22: note = Synthetic: Unmodified nucleotide sequence
  source 1..22: mol_type = other RNA
gttttagagctatgctgttttg

SEQ ID NO: 160 - RNA, 80 nt, synthetic construct
  misc_feature 1..80: note = Synthetic: Unmodified nucleotide sequence
  source 1..80: mol_type = other RNA
gttttagagctagaaatagcaagttaaaataaggctagtccgttatcaacttgaaaaagtggcaccgagtcggtgctttt

SEQ ID NO: 161 - RNA, 76 nt, synthetic construct
  misc_feature 1..76: note = Synthetic: Unmodified nucleotide sequence
  source 1..76: mol_type = other RNA
gttttagagctagaaatagcaagttaaaataaggctagtccgttatcaacttgaaaaagtggcaccgagtcggtgc

SEQ ID NO: 162 - RNA, 77 nt, synthetic construct
  misc_feature 1..77: note = Synthetic: Unmodified nucleotide sequence
  source 1..77: mol_type = other RNA
gttttagagctagaaatagcaagttaaaataaggctagtccgttatcaacttgaaaaagtggcaccgagtcggtgct

SEQ ID NO: 163 - RNA, 68 nt, synthetic construct
  misc_feature 1..68: note = Synthetic: Unmodified nucleotide sequence
  source 1..68: mol_type = other RNA
gttttagagctagaaatagcaagttaaaataaggctagtccgttatcaacttggcaccgagtcggtgc

SEQ ID NO: 164 - RNA, 68 nt, synthetic construct
  misc_feature 1..68: note = Synthetic: Unmodified nucleotide sequence
  source 1..68: mol_type = other RNA
gttttagagctagaaatagcaagttaaaataaggctagtccgttatcaaaatggcaccgagtcggtgc

SEQ ID NO: 165 - RNA, 69 nt, synthetic construct
  misc_feature 1..69: note = Synthetic: Unmodified nucleotide sequence
  source 1..69: mol_type = other RNA
gttttagagctagaaatagcaagttaaaataaggctagtccgttatcaaaatggcaccgagtcggtgct

SEQ ID NO: 166 - RNA, 70 nt, synthetic construct
  misc_feature 1..70: note = Synthetic: Unmodified nucleotide sequence
  source 1..70: mol_type = other RNA
gttttagagctagaaatagcaagttaaaataaggctagtccgttatcacgaaagggcaccgagtcggtgc

SEQ ID NO: 167 - RNA, 71 nt, synthetic construct
  misc_feature 1..71: note = Synthetic: Unmodified nucleotide sequence
  source 1..71: mol_type = other RNA
gttttagagctagaaatagcaagttaaaataaggctagtccgttatcacgaaagggcaccgagtcggtgct

SEQ ID NO: 168-169 - skipped (2 entries)

SEQ ID NO: 170 - RNA, 100 nt, synthetic construct
  misc_feature 1..100: note = Synthetic: Exemplary Unmodified Spy Cas9 Guide RNA sequence
  variation 1..20: note = n may be any natural or non-natural nucleotide
  source 1..100: mol_type = other RNA
nnnnnnnnnnnnnnnnnnnngttttagagctagaaatagcaagttaaaataaggctagtccgttatcaacttgaaaaagtggcaccgagtcggtgctttt

SEQ ID NO: 171 - RNA, 96 nt, synthetic construct
  misc_feature 1..96: note = Synthetic: Exemplary Unmodified Spy Cas9 Guide RNA sequence
  variation 1..20: note = n may be any natural or non-natural nucleotide
  source 1..96: mol_type = other RNA
nnnnnnnnnnnnnnnnnnnngttttagagctagaaatagcaagttaaaataaggctagtccgttatcaacttgaaaaagtggcaccgagtcggtgc

SEQ ID NO: 172 - RNA, 97 nt, synthetic construct
  misc_feature 1..97: note = Synthetic: Exemplary Unmodified Spy Cas9 Guide RNA sequence
  variation 1..20: note = n may be any natural or non-natural nucleotide
  source 1..97: mol_type = other RNA
nnnnnnnnnnnnnnnnnnnngttttagagctagaaatagcaagttaaaataaggctagtccgttatcaacttgaaaaagtggcaccgagtcggtgct

SEQ ID NO: 173 - RNA, 88 nt, synthetic construct
  misc_feature 1..88: note = Synthetic: Exemplary Unmodified Spy Cas9 Guide RNA sequence
  variation 1..20: note = n may be any natural or non-natural nucleotide
  source 1..88: mol_type = other RNA
nnnnnnnnnnnnnnnnnnnngttttagagctagaaatagcaagttaaaataaggctagtccgttatcaacttggcaccgagtcggtgc

SEQ ID NO: 174 - RNA, 88 nt, synthetic construct
  misc_feature 1..88: note = Synthetic: Exemplary Unmodified Spy Cas9 Guide RNA sequence
  variation 1..20: note = n may be any natural or non-natural nucleotide
  source 1..88: mol_type = other RNA
nnnnnnnnnnnnnnnnnnnngttttagagctagaaatagcaagttaaaataaggctagtccgttatcaaaatggcaccgagtcggtgc

SEQ ID NO: 175 - RNA, 89 nt, synthetic construct
  misc_feature 1..89: note = Synthetic: Exemplary Unmodified Spy Cas9 Guide RNA sequence
  variation 1..20: note = n may be any natural or non-natural nucleotide
  source 1..89: mol_type = other RNA
nnnnnnnnnnnnnnnnnnnnggttttagagctagaaatagcaagttaaaataaggctagtccgttatcaaaatggcaccgagtcggtgc

SEQ ID NO: 176 - RNA, 90 nt, synthetic construct
  misc_feature 1..90: note = Synthetic: Exemplary Unmodified Spy Cas9 Guide RNA sequence
  variation 1..20: note = n may be any natural or non-natural nucleotide
  source 1..90: mol_type = other RNA
nnnnnnnnnnnnnnnnnnnngttttagagctagaaatagcaagttaaaataaggctagtccgttatcacgaaagggcaccgagtcggtgc

SEQ ID NO: 177 - RNA, 91 nt, synthetic construct
  misc_feature 1..91: note = Synthetic: Exemplary Unmodified Spy Cas9 Guide RNA sequence
  variation 1..20: note = n may be any natural or non-natural nucleotide
  source 1..91: mol_type = other RNA
nnnnnnnnnnnnnnnnnnnngttttagagctagaaatagcaagttaaaataaggctagtccgttatcacgaaagggcaccgagtcggtgct

SEQ ID NO: 178-179 - skipped (2 entries)

SEQ ID NO: 180 - RNA, 80 nt, synthetic construct; identical to SEQ ID NO: 160
  misc_feature 1..80: note = Synthetic: Exemplary Spy Guide RNA conserved region only-modified sequence
  modified_base 9..20: mod_base = OTHER; note = 2'-O-methyl modified nucleotide
  modified_base 49..80: mod_base = OTHER; note = 2'-O-methyl modified nucleotide
  modified_base 77..80: mod_base = OTHER; note = phosphorothioate linkage
  source 1..80: mol_type = other RNA

SEQ ID NO: 181 - RNA, 76 nt, synthetic construct; identical to SEQ ID NO: 161
  misc_feature 1..76: note = Synthetic: Exemplary Spy Guide RNA conserved region only-modified sequence
  modified_base 9..20: mod_base = OTHER; note = 2'-O-methyl modified nucleotide
  modified_base 49..76: mod_base = OTHER; note = 2'-O-methyl modified nucleotide
  source 1..76: mol_type = other RNA

SEQ ID NO: 182 - RNA, 77 nt, synthetic construct; identical to SEQ ID NO: 162
  misc_feature 1..77: note = Synthetic: Exemplary Spy Guide RNA conserved region only-modified sequence
  modified_base 9..20: mod_base = OTHER; note = 2'-O-methyl modified nucleotide
  modified_base 49..77: mod_base = OTHER; note = 2'-O-methyl modified nucleotide
  source 1..77: mol_type = other RNA

SEQ ID NO: 183 - RNA, 68 nt, synthetic construct; identical to SEQ ID NO: 163
  misc_feature 1..68: note = Synthetic: Exemplary Spy Guide RNA conserved region only-modified sequence
  modified_base 9..20: mod_base = OTHER; note = 2'-O-methyl modified nucleotide
  modified_base 66..68: mod_base = OTHER; note = 2'-O-methyl modified nucleotide
  modified_base 65..68: mod_base = OTHER; note = phosphorothioate linkage
  source 1..68: mol_type = other RNA

SEQ ID NO: 184 - RNA, 68 nt, synthetic construct; identical to SEQ ID NO: 164
  misc_feature 1..68: note = Synthetic: Exemplary Spy Guide RNA conserved region only-modified sequence
  modified_base 9..20: mod_base = OTHER; note = 2'-O-methyl modified nucleotide
  modified_base 66..68: mod_base = OTHER; note = 2'-O-methyl modified nucleotide
  modified_base 65..68: mod_base = OTHER; note = phosphorothioate linkage
  source 1..68: mol_type = other RNA

SEQ ID NO: 185 - RNA, 68 nt, synthetic construct; identical to SEQ ID NO: 164
  misc_feature 1..68: note = Synthetic: Exemplary Spy Guide RNA conserved region only-modified sequence
  modified_base 9..20: mod_base = OTHER; note = 2'-O-methyl modified nucleotide
  modified_base 49..68: mod_base = OTHER; note = 2'-O-methyl modified nucleotide
  modified_base 65..68: mod_base = OTHER; note = phosphorothioate linkage
  source 1..68: mol_type = other RNA

SEQ ID NO: 186 - RNA, 70 nt, synthetic construct; identical to SEQ ID NO: 166
  misc_feature 1..70: note = Synthetic: Exemplary Spy Guide RNA conserved region only-modified sequence
  modified_base 9..20: mod_base = OTHER; note = 2'-O-methyl modified nucleotide
  modified_base 49..68: mod_base = OTHER; note = 2'-O-methyl modified nucleotide
  modified_base 65..68: mod_base = OTHER; note = phosphorothioate linkage
  source 1..70: mol_type = other RNA

SEQ ID NO: 187 - RNA, 70 nt, synthetic construct; identical to SEQ ID NO: 166
  misc_feature 1..70: note = Synthetic: Exemplary Spy Guide RNA conserved region only-modified sequence
  modified_base 9..20: mod_base = OTHER; note = 2'-O-methyl modified nucleotide
  modified_base 49..70: mod_base = OTHER; note = 2'-O-methyl modified nucleotide
  modified_base 67..70: mod_base = OTHER; note = phosphorothioate linkage
  source 1..70: mol_type = other RNA

SEQ ID NO: 188 - RNA, 71 nt, synthetic construct; identical to SEQ ID NO: 167
  misc_feature 1..71: note = Synthetic: Exemplary Spy Guide RNA conserved region only-modified sequence
  modified_base 9..20: mod_base = OTHER; note = 2'-O-methyl modified nucleotide
  modified_base 69..71: mod_base = OTHER; note = 2'-O-methyl modified nucleotide
  modified_base 68..71: mod_base = OTHER; note = phosphorothioate linkage
  source 1..71: mol_type = other RNA

SEQ ID NO: 189 - RNA, 71 nt, synthetic construct; identical to SEQ ID NO: 167
  misc_feature 1..71: note = Synthetic: Exemplary Spy Guide RNA conserved region only-modified sequence
  modified_base 9..20: mod_base = OTHER; note = 2'-O-methyl modified nucleotide
  modified_base 69..71: mod_base = OTHER; note = 2'-O-methyl modified nucleotide
  modified_base 68..71: mod_base = OTHER; note = phosphorothioate linkage
  source 1..71: mol_type = other RNA

SEQ ID NO: 190 - RNA, 71 nt, synthetic construct; identical to SEQ ID NO: 167
  misc_feature 1..71: note = Synthetic: Exemplary Spy Guide RNA conserved region only-modified sequence
  modified_base 5: mod_base = OTHER; note = 2'-fluoro modified nucleotide
  modified_base 8..22: mod_base = OTHER; note = 2'-O-methyl modified nucleotide
  modified_base 25: mod_base = OTHER; note = 2-fluoro modified nucleotide
  modified_base 26: mod_base = OTHER; note = 2'-O-methyl modified nucleotide
  modified_base 27: mod_base = OTHER; note = 2-fluoro modified nucleotide
  modified_base 28: mod_base = OTHER; note = 2'-O-methyl modified nucleotide
  modified_base 29: mod_base = OTHER; note = 2-fluoro modified nucleotide
  modified_base 30: mod_base = OTHER; note = 2'-O-methyl modified nucleotide
  modified_base 32..37: mod_base = OTHER; note = 2'-O-methyl modified nucleotide
  modified_base 40: mod_base = OTHER; note = 2'-O-methyl modified nucleotide
  modified_base 41: mod_base = OTHER; note = 2'-O-methyl modified nucleotide
  modified_base 44: mod_base = OTHER; note = 2-fluoro modified nucleotide
  modified_base 46: mod_base = OTHER; note = 2'-O-methyl modified nucleotide
  modified_base 47: mod_base = OTHER; note = 2'-O-methyl modified nucleotide
  modified_base 49..71: mod_base = OTHER; note = 2'-O-methyl modified nucleotide
  source 1..71: mol_type = other RNA

SEQ ID NO: 191 - RNA, 71 nt, synthetic construct; identical to SEQ ID NO: 167
  misc_feature 1..71: note = Synthetic: Exemplary Spy Guide RNA conserved region only-modified sequence
  modified_base 9..20: mod_base = OTHER; note = 2'-O-methyl modified nucleotide
  modified_base 68..71: mod_base = OTHER; note = 2'-O-methyl modified nucleotide
  modified_base 68..71: mod_base = OTHER; note = phosphorothioate linkage
  source 1..71: mol_type = other RNA

SEQ ID NO: 192 - RNA, 100 nt, synthetic construct; identical to SEQ ID NO: 170
  misc_feature 1..100: note = Synthetic: Exemplary Spy Guide RNA -modified sequence
  variation 1..20: note = n may be any natural or non-natural nucleotide
  modified_base 1..3: mod_base = OTHER; note = 2'-O-methyl modified nucleotide
  modified_base 1..4: mod_base = OTHER; note = phosphorothioate linkage
  modified_base 29..40: mod_base = OTHER; note = 2'-O-methyl modified nucleotide
  modified_base 69..100: mod_base = OTHER; note = 2'-O-methyl modified nucleotide
  modified_base 97..100: mod_base = OTHER; note = phosphorothioate linkage
  source 1..100: mol_type = other RNA

SEQ ID NO: 193 - RNA, 90 nt, synthetic construct; identical to SEQ ID NO: 176
  misc_feature 1..90: note = Synthetic: Exemplary Spy Guide RNA -modified sequence
  variation 1..20: note = n may be any natural or non-natural nucleotide
  modified_base 1..3: mod_base = OTHER; note = 2'-O-methyl modified nucleotide
  modified_base 1..4: mod_base = OTHER; note = phosphorothioate linkage
  modified_base 29..40: mod_base = OTHER; note = 2'-O-methyl modified nucleotide
  modified_base 88..90: mod_base = OTHER; note = 2'-O-methyl modified nucleotide
  modified_base 87..90: mod_base = OTHER; note = phosphorothioate linkage
  source 1..90: mol_type = other RNA

SEQ ID NO: 194 - RNA, 91 nt, synthetic construct; identical to SEQ ID NO: 177
  misc_feature 1..91: note = Synthetic: Exemplary Spy Guide RNA -modified sequence
  variation 1..20: note = n may be any natural or non-natural nucleotide
  modified_base 1..3: mod_base = OTHER; note = 2'-O-methyl modified nucleotide
  modified_base 1..4: mod_base = OTHER; note = phosphorothioate linkage
  modified_base 29..40: mod_base = OTHER; note = 2'-O-methyl modified nucleotide
  modified_base 88..91: mod_base = OTHER; note = 2'-O-methyl modified nucleotide
  modified_base 88..91: mod_base = OTHER; note = phosphorothioate linkage
  source 1..91: mol_type = other RNA

SEQ ID NO: 195-199 - skipped (5 entries)

SEQ ID NO: 200 - RNA, 100 nt, synthetic construct
  misc_feature 1..100: note = Synthetic: Exemplary Spy guide; G000267
  modified_base 1..3: mod_base = OTHER; note = 2'-O-methyl modified nucleotide
  modified_base 1..4: mod_base = OTHER; note = phosphorothioate linkage
  modified_base 29..40: mod_base = OTHER; note = 2'-O-methyl modified nucleotide
  modified_base 69..100: mod_base = OTHER; note = 2'-O-methyl modified nucleotide
  modified_base 97..100: mod_base = OTHER; note = phosphorothioate linkage
  source 1..100: mol_type = other RNA
ccagtccagcgaggcaaagggttttagagctagaaatagcaagttaaaataaggctagtccgttatcaacttgaaaaagtggcaccgagtcggtgctttt

SEQ ID NO: 201 - RNA, 100 nt, synthetic construct
  misc_feature 1..100: note = Synthetic: Exemplary Spy guide; G000502
  modified_base 1..3: mod_base = OTHER; note = 2'-O-methyl modified nucleotide
  modified_base 1..4: mod_base = OTHER; note = phosphorothioate linkage
  modified_base 29..40: mod_base = OTHER; note = 2'-O-methyl modified nucleotide
  modified_base 69..100: mod_base = OTHER; note = 2'-O-methyl modified nucleotide
  modified_base 97..100: mod_base = OTHER; note = phosphorothioate linkage
  source 1..100: mol_type = other RNA
acacaaataccagtccagcggttttagagctagaaatagcaagttaaaataaggctagtccgttatcaacttgaaaaagtggcaccgagtcggtgctttt

SEQ ID NO: 202 - RNA, 100 nt, synthetic construct
  misc_feature 1..100: note = Synthetic: Exemplary Spy guide; G000603
  modified_base 1..3: mod_base = OTHER; note = 2'-O-methyl modified nucleotide
  modified_base 1..4: mod_base = OTHER; note = phosphorothioate linkage
  modified_base 29..40: mod_base = OTHER; note = 2'-O-methyl modified nucleotide
  modified_base 69..100: mod_base = OTHER; note = 2'-O-methyl modified nucleotide
  modified_base 97..100: mod_base = OTHER; note = phosphorothioate linkage
  source 1..100: mol_type = other RNA
cccagaggcaaagggctcccgttttagagctagaaatagcaagttaaaataaggctagtccgttatcaacttgaaaaagtggcaccgagtcggtgctttt

SEQ ID NO: 203 - RNA, 100 nt, synthetic construct
  misc_feature 1..100: note = Synthetic: Exemplary Spy guide; G000606
  modified_base 1..3: mod_base = OTHER; note = 2'-O-methyl modified nucleotide
  modified_base 1..4: mod_base = OTHER; note = phosphorothioate linkage
  modified_base 29..40: mod_base = OTHER; note = 2'-O-methyl modified nucleotide
  modified_base 69..100: mod_base = OTHER; note = 2'-O-methyl modified nucleotide
  modified_base 97..100: mod_base = OTHER; note = phosphorothioate linkage
  source 1..100: mol_type = other RNA
agtgttcaaaaagacctctggttttagagctagaaatagcaagttaaaataaggctagtccgttatcaacttgaaaaagtggcaccgagtcggtgctttt

SEQ ID NO: 204 - RNA, 100 nt, synthetic construct
  misc_feature 1..100: note = Synthetic: Exemplary Spy guide; G000665
  modified_base 1..3: mod_base = OTHER; note = 2'-O-methyl modified nucleotide
  modified_base 1..4: mod_base = OTHER; note = phosphorothioate linkage
  modified_base 29..40: mod_base = OTHER; note = 2'-O-methyl modified nucleotide
  modified_base 69..100: mod_base = OTHER; note = 2'-O-methyl modified nucleotide
  modified_base 97..100: mod_base = OTHER; note = phosphorothioate linkage
  source 1..100: mol_type = other RNA
ctccctgatggagatgacaggttttagagctagaaatagcaagttaaaataaggctagtccgttatcaacttgaaaaagtggcaccgagtcggtgctttt

SEQ ID NO: 205 - RNA, 100 nt, synthetic construct
  misc_feature 1..100: note = Synthetic: Exemplary Spy guide; G009577
  modified_base 1..3: mod_base = OTHER; note = 2'-O-methyl modified nucleotide
  modified_base 1..4: mod_base = OTHER; note = phosphorothioate linkage
  modified_base 29..40: mod_base = OTHER; note = 2'-O-methyl modified nucleotide
  modified_base 69..100: mod_base = OTHER; note = 2'-O-methyl modified nucleotide
  modified_base 97..100: mod_base = OTHER; note = phosphorothioate linkage
  source 1..100: mol_type = other RNA
ctttctacaagcttacccaggttttagagctagaaatagcaagttaaaataaggctagtccgttatcaacttgaaaaagtggcaccgagtcggtgctttt

SEQ ID NO: 206 - RNA, 115 nt, synthetic construct
  modified_base 4: mod_base = OTHER; note = thymine
  modified_base 9..10: mod_base = OTHER; note = thymine
  modified_base 18: mod_base = OTHER; note = thymine
  modified_base 22..25: mod_base = OTHER; note = thymine
  modified_base 31: mod_base = OTHER; note = thymine
  modified_base 37: mod_base = OTHER; note = thymine
  modified_base 44..45: mod_base = OTHER; note = thymine
  modified_base 50: mod_base = OTHER; note = thymine
  modified_base 56: mod_base = OTHER; note = thymine
  modified_base 59: mod_base = OTHER; note = thymine
  modified_base 63..64: mod_base = OTHER; note = thymine
  modified_base 66: mod_base = OTHER; note = thymine
  modified_base 71..72: mod_base = OTHER; note = thymine
  modified_base 80: mod_base = OTHER; note = thymine
  modified_base 90: mod_base = OTHER; note = thymine
  modified_base 94: mod_base = OTHER; note = thymine
  modified_base 97..103: mod_base = OTHER; note = thymine
  modified_base 106: mod_base = OTHER; note = thymine
  modified_base 112: mod_base = OTHER; note = thymine
  misc_feature 1..115: note = Synthetic: Exemplary Spy guide; G012684
  source 1..115: mol_type = other RNA
cagtgcggttccacacatacgttttagagctagaaatagcaagttaaaataaggctagtccgttatcaacttgaaaaagtggcaccgagtcggtgctttttttggtaccggtacc

SEQ ID NO: 207 - RNA, 115 nt, synthetic construct
  modified_base 6: mod_base = OTHER; note = thymine
  modified_base 10: mod_base = OTHER; note = thymine
  modified_base 15: mod_base = OTHER; note = thymine
  modified_base 19: mod_base = OTHER; note = thymine
  modified_base 22..25: mod_base = OTHER; note = thymine
  modified_base 31: mod_base = OTHER; note = thymine
  modified_base 37: mod_base = OTHER; note = thymine
  modified_base 44..45: mod_base = OTHER; note = thymine
  modified_base 50: mod_base = OTHER; note = thymine
  modified_base 56: mod_base = OTHER; note = thymine
  modified_base 59: mod_base = OTHER; note = thymine
  modified_base 63..64: mod_base = OTHER; note = thymine
  modified_base 66: mod_base = OTHER; note = thymine
  modified_base 71..72: mod_base = OTHER; note = thymine
  modified_base 80: mod_base = OTHER; note = thymine
  modified_base 90: mod_base = OTHER; note = thymine
  modified_base 94: mod_base = OTHER; note = thymine
  modified_base 97..103: mod_base = OTHER; note = thymine
  modified_base 106: mod_base = OTHER; note = thymine
  modified_base 112: mod_base = OTHER; note = thymine
  misc_feature 1..115: note = Synthetic: Exemplary Spy guide; G012685
  source 1..115: mol_type = other RNA
aagcctgcatgagctcagtggttttagagctagaaatagcaagttaaaataaggctagtccgttatcaacttgaaaaagtggcaccgagtcggtgctttttttggtaccggtacc

SEQ ID NO: 208 - RNA, 115 nt, synthetic construct
  modified_base 2: mod_base = OTHER; note = thymine
  modified_base 6: mod_base = OTHER; note = thymine
  modified_base 17: mod_base = OTHER; note = thymine
  modified_base 22..25: mod_base = OTHER; note = thymine
  modified_base 31: mod_base = OTHER; note = thymine
  modified_base 37: mod_base = OTHER; note = thymine
  modified_base 44..45: mod_base = OTHER; note = thymine
  modified_base 50: mod_base = OTHER; note = thymine
  modified_base 56: mod_base = OTHER; note = thymine
  modified_base 59: mod_base = OTHER; note = thymine
  modified_base 63..64: mod_base = OTHER; note = thymine
  modified_base 66: mod_base = OTHER; note = thymine
  modified_base 71..72: mod_base = OTHER; note = thymine
  modified_base 80: mod_base = OTHER; note = thymine
  modified_base 90: mod_base = OTHER; note = thymine
  modified_base 94: mod_base = OTHER; note = thymine
  modified_base 97..103: mod_base = OTHER; note = thymine
  modified_base 106: mod_base = OTHER; note = thymine
  modified_base 112: mod_base = OTHER; note = thymine
  misc_feature 1..115: note = Synthetic: Exemplary Spy guide; G012686
  source 1..115: mol_type = other RNA
atgggtcacagacgggtccagttttagagctagaaatagcaagttaaaataaggctagtccgttatcaacttgaaaaagtggcaccgagtcggtgctttttttggtaccggtacc

SEQ ID NO: 209 - RNA, 115 nt, synthetic construct
  modified_base 2: mod_base = OTHER; note = thymine
  modified_base 15: mod_base = OTHER; note = thymine
  modified_base 20: mod_base = OTHER; note = thymine
  modified_base 22..25: mod_base = OTHER; note = thymine
  modified_base 31: mod_base = OTHER; note = thymine
  modified_base 37: mod_base = OTHER; note = thymine
  modified_base 44..45: mod_base = OTHER; note = thymine
  modified_base 50: mod_base = OTHER; note = thymine
  modified_base 56: mod_base = OTHER; note = thymine
  modified_base 59: mod_base = OTHER; note = thymine
  modified_base 63..64: mod_base = OTHER; note = thymine
  modified_base 66: mod_base = OTHER; note = thymine
  modified_base 71..72: mod_base = OTHER; note = thymine
  modified_base 80: mod_base = OTHER; note = thymine
  modified_base 90: mod_base = OTHER; note = thymine
  modified_base 94: mod_base = OTHER; note = thymine
  modified_base 97..103: mod_base = OTHER; note = thymine
  modified_base 106: mod_base = OTHER; note = thymine
  modified_base 112: mod_base = OTHER; note = thymine
  misc_feature 1..115: note = Synthetic: Exemplary Spy guide; G012687
  source 1..115: mol_type = other RNA
ctcaaagagacccatgagatgttttagagctagaaatagcaagttaaaataaggctagtccgttatcaacttgaaaaagtggcaccgagtcggtgctttttttggtaccggtacc

SEQ ID NO: 210 - RNA, 115 nt, synthetic construct
  modified_base 2: mod_base = OTHER; note = thymine
  modified_base 4: mod_base = OTHER; note = thymine
  modified_base 7: mod_base = OTHER; note = thymine
  modified_base 9..11: mod_base = OTHER; note = thymine
  modified_base 14: mod_base = OTHER; note = thymine
  modified_base 16: mod_base = OTHER; note = thymine
  modified_base 18: mod_base = OTHER; note = thymine
  modified_base 22..25: mod_base = OTHER; note = thymine
  modified_base 31: mod_base = OTHER; note = thymine
  modified_base 37: mod_base = OTHER; note = thymine
  modified_base 44..45: mod_base = OTHER; note = thymine
  modified_base 50: mod_base = OTHER; note = thymine
  modified_base 56: mod_base = OTHER; note = thymine
  modified_base 59: mod_base = OTHER; note = thymine
  modified_base 63..64: mod_base = OTHER; note = thymine
  modified_base 66: mod_base = OTHER; note = thymine
  modified_base 71..72: mod_base = OTHER; note = thymine
  modified_base 80: mod_base = OTHER; note = thymine
  modified_base 90: mod_base = OTHER; note = thymine
  modified_base 94: mod_base = OTHER; note = thymine
  modified_base 97..103: mod_base = OTHER; note = thymine
  modified_base 106: mod_base = OTHER; note = thymine
  modified_base 112: mod_base = OTHER; note = thymine
  misc_feature 1..115: note = Synthetic: Exemplary Spy guide; G012688
  source 1..115: mol_type = other RNA
atctcgtatttcatgtctccgttttagagctagaaatagcaagttaaaataaggctagtccgttatcaacttgaaaaagtggcaccgagtcggtgctttttttggtaccggtacc

SEQ ID NO: 211 - RNA, 115 nt, synthetic construct
  modified_base 5..6: mod_base = OTHER; note = thymine
  modified_base 10: mod_base = OTHER; note = thymine
  modified_base 12: mod_base = OTHER; note = thymine
  modified_base 15: mod_base = OTHER; note = thymine
  modified_base 18: mod_base = OTHER; note = thymine
  modified_base 20: mod_base = OTHER; note = thymine
  modified_base 22..25: mod_base = OTHER; note = thymine
  modified_base 31: mod_base = OTHER; note = thymine
  modified_base 37: mod_base = OTHER; note = thymine
  modified_base 44..45: mod_base = OTHER; note = thymine
  modified_base 50: mod_base = OTHER; note = thymine
  modified_base 56: mod_base = OTHER; note = thymine
  modified_base 59: mod_base = OTHER; note = thymine
  modified_base 63..64: mod_base = OTHER; note = thymine
  modified_base 66: mod_base = OTHER; note = thymine
  modified_base 71..72: mod_base = OTHER; note = thymine
  modified_base 80: mod_base = OTHER; note = thymine
  modified_base 90: mod_base = OTHER; note = thymine
  modified_base 94: mod_base = OTHER; note = thymine
  modified_base 97..103: mod_base = OTHER; note = thymine
  modified_base 106: mod_base = OTHER; note = thymine
  modified_base 112: mod_base = OTHER; note = thymine
  misc_feature 1..115: note = Synthetic: Exemplary Spy guide; G012746
  source 1..115: mol_type = other RNA
caccttggctgtagtcatctgttttagagctagaaatagcaagttaaaataaggctagtccgttatcaacttgaaaaagtggcaccgagtcggtgctttttttggtaccggtacc

SEQ ID NO: 212 - RNA, 100 nt, synthetic construct
  misc_feature 1..100: note = Synthetic: Exemplary Spy guide; G014304
  modified_base 1..3: mod_base = OTHER; note = 2'-O-methyl modified nucleotide
  modified_base 1..4: mod_base = OTHER; note = phosphorothioate linkage
  modified_base 29..40: mod_base = OTHER; note = 2'-O-methyl modified nucleotide
  modified_base 69..100: mod_base = OTHER; note = 2'-O-methyl modified nucleotide
  modified_base 97..100: mod_base = OTHER; note = phosphorothioate linkage
  source 1..100: mol_type = other RNA
ataccagtccagcgaggcaagttttagagctagaaatagcaagttaaaataaggctagtccgttatcaacttgaaaaagtggcaccgagtcggtgctttt

SEQ ID NO: 213 - RNA, 100 nt, synthetic construct
  misc_feature 1..100: note = Synthetic: Exemplary Spy guide; G014317
  modified_base 1..3: mod_base = OTHER; note = 2'-O-methyl modified nucleotide
  modified_base 1..4: mod_base = OTHER; note = phosphorothioate linkage
  modified_base 29..40: mod_base = OTHER; note = 2'-O-methyl modified nucleotide
  modified_base 69..100: mod_base = OTHER; note = 2'-O-methyl modified nucleotide
  modified_base 97..100: mod_base = OTHER; note = phosphorothioate linkage
  source 1..100: mol_type = other RNA
cctcctttgcctcgctggacgttttagagctagaaatagcaagttaaaataaggctagtccgttatcaacttgaaaaagtggcaccgagtcggtgctttt

SEQ ID NO: 214 - RNA, 100 nt, synthetic construct
  misc_feature 1..100: note = Synthetic: Exemplary Spy guide; G014322
  modified_base 1..3: mod_base = OTHER; note = 2'-O-methyl modified nucleotide
  modified_base 1..4: mod_base = OTHER; note = phosphorothioate linkage
  modified_base 29..40: mod_base = OTHER; note = 2'-O-methyl modified nucleotide
  modified_base 69..100: mod_base = OTHER; note = 2'-O-methyl modified nucleotide
  modified_base 97..100: mod_base = OTHER; note = phosphorothioate linkage
  source 1..100: mol_type = other RNA
ctggtatttgtgtctgaagcgttttagagctagaaatagcaagttaaaataaggctagtccgttatcaacttgaaaaagtggcaccgagtcggtgctttt

SEQ ID NO: 215 - RNA, 100 nt, synthetic construct
  misc_feature 1..100: note = Synthetic: Exemplary Spy guide; G014323
  modified_base 1..3: mod_base = OTHER; note = 2'-O-methyl modified nucleotide
  modified_base 1..4: mod_base = OTHER; note = phosphorothioate linkage
  modified_base 29..40: mod_base = OTHER; note = 2'-O-methyl modified nucleotide
  modified_base 69..100: mod_base = OTHER; note = 2'-O-methyl modified nucleotide
  modified_base 97..100: mod_base = OTHER; note = phosphorothioate linkage
  source 1..100: mol_type = other RNA
gcaaaggaggaagagtcgaagttttagagctagaaatagcaagttaaaataaggctagtccgttatcaacttgaaaaagtggcaccgagtcggtgctttt

SEQ ID NO: 216 - RNA, 100 nt, synthetic construct
  misc_feature 1..100: note = Synthetic: Exemplary Spy guide; G014325
  modified_base 1..3: mod_base = OTHER; note = 2'-O-methyl modified nucleotide
  modified_base 1..4: mod_base = OTHER; note = phosphorothioate linkage
  modified_base 29..40: mod_base = OTHER; note = 2'-O-methyl modified nucleotide
  modified_base 69..100: mod_base = OTHER; note = 2'-O-methyl modified nucleotide
  modified_base 97..100: mod_base = OTHER; note = phosphorothioate linkage
  source 1..100: mol_type = other RNA
ctcttcctcctttgcctcgcgttttagagctagaaatagcaagttaaaataaggctagtccgttatcaacttgaaaaagtggcaccgagtcggtgctttt

SEQ ID NO: 217 - RNA, 100 nt, synthetic construct
  misc_feature 1..100: note = Synthetic: Exemplary Spy guide; G014326
  modified_base 1..3: mod_base = OTHER; note = 2'-O-methyl modified nucleotide
  modified_base 1..4: mod_base = OTHER; note = phosphorothioate linkage
  modified_base 29..40: mod_base = OTHER; note = 2'-O-methyl modified nucleotide
  modified_base 69..100: mod_base = OTHER; note = 2'-O-methyl modified nucleotide
  modified_base 97..100: mod_base = OTHER; note = phosphorothioate linkage
  source 1..100: mol_type = other RNA
ggcaaaggaggaagagtcgagttttagagctagaaatagcaagttaaaataaggctagtccgttatcaacttgaaaaagtggcaccgagtcggtgctttt

SEQ ID NO: 218 - RNA, 100 nt, synthetic construct
  misc_feature 1..100: note = Synthetic: Exemplary Spy guide; G016128
  modified_base 1..3: mod_base = OTHER; note = 2'-O-methyl modified nucleotide
  modified_base 1..4: mod_base = OTHER; note = phosphorothioate linkage
  modified_base 29..40: mod_base = OTHER; note = 2'-O-methyl modified nucleotide
  modified_base 69..100: mod_base = OTHER; note = 2'-O-methyl modified nucleotide
  modified_base 97..100: mod_base = OTHER; note = phosphorothioate linkage
  source 1..100: mol_type = other RNA
tttgaccatcagaggacattgttttagagctagaaatagcaagttaaaataaggctagtccgttatcaacttgaaaaagtggcaccgagtcggtgctttt

SEQ ID NO: 219 - RNA, 100 nt, synthetic construct
  misc_feature 1..100: note = Synthetic: Exemplary Spy guide; G016133
  modified_base 1..3: mod_base = OTHER; note = 2'-O-methyl modified nucleotide
  modified_base 1..4: mod_base = OTHER; note = phosphorothioate linkage
  modified_base 29..40: mod_base = OTHER; note = 2'-O-methyl modified nucleotide
  modified_base 69..100: mod_base = OTHER; note = 2'-O-methyl modified nucleotide
  modified_base 97..100: mod_base = OTHER; note = phosphorothioate linkage
  source 1..100: mol_type = other RNA
gggctcccaggatccctcaggttttagagctagaaatagcaagttaaaataaggctagtccgttatcaacttgaaaaagtggcaccgagtcggtgctttt

SEQ ID NO: 220 - RNA, 100 nt, synthetic construct
  misc_feature 1..100: note = Synthetic: Exemplary Spy guide; G016138
  modified_base 1..3: mod_base = OTHER; note = 2'-O-methyl modified nucleotide
  modified_base 1..4: mod_base = OTHER; note = phosphorothioate linkage
  modified_base 29..40: mod_base = OTHER; note = 2'-O-methyl modified nucleotide
  modified_base 69..100: mod_base = OTHER; note = 2'-O-methyl modified nucleotide
  modified_base 97..100: mod_base = OTHER; note = phosphorothioate linkage
  source 1..100: mol_type = other RNA
aaagacctctgagggatcctgttttagagctagaaatagcaagttaaaataaggctagtccgttatcaacttgaaaaagtggcaccgagtcggtgctttt

SEQ ID NO: 221 - RNA, 100 nt, synthetic construct
  misc_feature 1..100: note = Synthetic: Exemplary Spy guide; G016139
  modified_base 1..3: mod_base = OTHER; note = 2'-O-methyl modified nucleotide
  modified_base 1..4: mod_base = OTHER; note = phosphorothioate linkage
  modified_base 29..40: mod_base = OTHER; note = 2'-O-methyl modified nucleotide
  modified_base 69..100: mod_base = OTHER; note = 2'-O-methyl modified nucleotide
  modified_base 97..100: mod_base = OTHER; note = phosphorothioate linkage
  source 1..100: mol_type = other RNA
tcctgggagccctttgcctcgttttagagctagaaatagcaagttaaaataaggctagtccgttatcaacttgaaaaagtggcaccgagtcggtgctttt

SEQ ID NO: 222 - RNA, 100 nt, synthetic construct
  misc_feature 1..100: note = Synthetic: Exemplary Spy guide; G016145
  modified_base 1..3: mod_base = OTHER; note = 2'-O-methyl modified nucleotide
  modified_base 1..4: mod_base = OTHER; note = phosphorothioate linkage
  modified_base 29..40: mod_base = OTHER; note = 2'-O-methyl modified nucleotide
  modified_base 69..100: mod_base = OTHER; note = 2'-O-methyl modified nucleotide
  modified_base 97..100: mod_base = OTHER; note = phosphorothioate linkage
  source 1..100: mol_type = other RNA
aaaagacctctgagggatccgttttagagctagaaatagcaagttaaaataaggctagtccgttatcaacttgaaaaagtggcaccgagtcggtgctttt

SEQ ID NO: 223 - RNA, 100 nt, synthetic construct
  misc_feature 1..100: note = Synthetic: Exemplary Spy guide; G016146
  modified_base 1..3: mod_base = OTHER; note = 2'-O-methyl modified nucleotide
  modified_base 1..4: mod_base = OTHER; note = phosphorothioate linkage
  modified_base 29..40: mod_base = OTHER; note = 2'-O-methyl modified nucleotide
  modified_base 69..100: mod_base = OTHER; note = 2'-O-methyl modified nucleotide
  modified_base 97..100: mod_base = OTHER; note = phosphorothioate linkage
  source 1..100: mol_type = other RNA
gtgttcaaaaagacctctgagttttagagctagaaatagcaagttaaaataaggctagtccgttatcaacttgaaaaagtggcaccgagtcggtgctttt

SEQ ID NO: 224 - RNA, 100 nt, synthetic construct
  misc_feature 1..100: note = Synthetic: Exemplary Spy guide; G016148
  modified_base 1..3: mod_base = OTHER; note = 2'-O-methyl modified nucleotide
  modified_base 1..4: mod_base = OTHER; note = phosphorothioate linkage
  modified_base 29..40: mod_base = OTHER; note = 2'-O-methyl modified nucleotide
  modified_base 69..100: mod_base = OTHER; note = 2'-O-methyl modified nucleotide
  modified_base 97..100: mod_base = OTHER; note = phosphorothioate linkage
  source 1..100: mol_type = other RNA
agaatccaaatgtcctctgagttttagagctagaaatagcaagttaaaataaggctagtccgttatcaacttgaaaaagtggcaccgagtcggtgctttt

SEQ ID NO: 225 - RNA, 100 nt, synthetic construct
  misc_feature 1..100: note = Synthetic: Exemplary Spy guide; G016157
  modified_base 1..3: mod_base = OTHER; note = 2'-O-methyl modified nucleotide
  modified_base 1..4: mod_base = OTHER; note = phosphorothioate linkage
  modified_base 29..40: mod_base = OTHER; note = 2'-O-methyl modified nucleotide
  modified_base 69..100: mod_base = OTHER; note = 2'-O-methyl modified nucleotide
  modified_base 97..100: mod_base = OTHER; note = phosphorothioate linkage
  source 1..100: mol_type = other RNA
acaagcttacccagaggcaagttttagagctagaaatagcaagttaaaataaggctagtccgttatcaacttgaaaaagtggcaccgagtcggtgctttt

SEQ ID NO: 226 - RNA, 100 nt, synthetic construct
  misc_feature 1..100: note = Synthetic: Exemplary Spy guide; G016163
  modified_base 1..3: mod_base = OTHER; note = 2'-O-methyl modified nucleotide
  modified_base 1..4: mod_base = OTHER; note = phosphorothioate linkage
  modified_base 29..40: mod_base = OTHER; note = 2'-O-methyl modified nucleotide
  modified_base 69..100: mod_base = OTHER; note = 2'-O-methyl modified nucleotide
  modified_base 97..100: mod_base = OTHER; note = phosphorothioate linkage
  source 1..100: mol_type = other RNA
caagcttacccagaggcaaagttttagagctagaaatagcaagttaaaataaggctagtccgttatcaacttgaaaaagtggcaccgagtcggtgctttt

SEQ ID NO: 227 - RNA, 100 nt, synthetic construct
  misc_feature 1..100: note = Synthetic: Exemplary Spy guide; G016164
  modified_base 1..3: mod_base = OTHER; note = 2'-O-methyl modified nucleotide
  modified_base 1..4: mod_base = OTHER; note = phosphorothioate linkage
  modified_base 29..40: mod_base = OTHER; note = 2'-O-methyl modified nucleotide
  modified_base 69..100: mod_base = OTHER; note = 2'-O-methyl modified nucleotide
  modified_base 97..100: mod_base = OTHER; note = phosphorothioate linkage
  source 1..100: mol_type = other RNA
ctcctctgtgcccagggtgcgttttagagctagaaatagcaagttaaaataaggctagtccgttatcaacttgaaaaagtggcaccgagtcggtgctttt

SEQ ID NO: 228 - RNA, 89 nt, synthetic construct
  misc_feature 1..89: note = Synthetic: Exemplary Spy guide; G017875
  modified_base 1..3: mod_base = OTHER; note = 2'-O-methyl modified nucleotide
  modified_base 1..4: mod_base = OTHER; note = phosphorothioate linkage
  modified_base 87..89: mod_base = OTHER; note = 2'-O-methyl modified nucleotide
  modified_base 86..89: mod_base = OTHER; note = phosphorothioate linkage
  source 1..89: mol_type = other RNA
ctactgtgccccaccggcgcgttttagagctagaaatagcaagttaaaataaggctagtccgttatcaaaatggcaccgagtcggtgct

SEQ ID NO: 229 - RNA, 89 nt, synthetic construct
  misc_feature 1..89: note = Synthetic: Exemplary Spy guide; G017876
  modified_base 1..3: mod_base = OTHER; note = 2'-O-methyl modified nucleotide
  modified_base 1..4: mod_base = OTHER; note = phosphorothioate linkage
  modified_base 87..89: mod_base = OTHER; note = 2'-O-methyl modified nucleotide
  modified_base 86..89: mod_base = OTHER; note = phosphorothioate linkage
  source 1..89: mol_type = other RNA
gctggtgcccaggacgaggagttttagagctagaaatagcaagttaaaataaggctagtccgttatcaaaatggcaccgagtcggtgct

SEQ ID NO: 230 - RNA, 89 nt, synthetic construct
  misc_feature 1..89: note = Synthetic: Exemplary Spy guide; G017877
  modified_base 1..3: mod_base = OTHER; note = 2'-O-methyl modified nucleotide
  modified_base 1..4: mod_base = OTHER; note = phosphorothioate linkage
  modified_base 87..89: mod_base = OTHER; note = 2'-O-methyl modified nucleotide
  modified_base 86..89: mod_base = OTHER; note = phosphorothioate linkage
  source 1..89: mol_type = other RNA
caccttccgccgttgctccagttttagagctagaaatagcaagttaaaataaggctagtccgttatcaaaatggcaccgagtcggtgct

SEQ ID NO: 231 - RNA, 89 nt, synthetic construct
  misc_feature 1..89: note = Synthetic: Exemplary Spy guide; G017879
  modified_base 1..3: mod_base = OTHER; note = 2'-O-methyl modified nucleotide
  modified_base 1..4: mod_base = OTHER; note = phosphorothioate linkage
  modified_base 87..89: mod_base = OTHER; note = 2'-O-methyl modified nucleotide
  modified_base 86..89: mod_base = OTHER; note = phosphorothioate linkage
  source 1..89: mol_type = other RNA
ccgccgttgctccaaggtatgttttagagctagaaatagcaagttaaaataaggctagtccgttatcaaaatggcaccgagtcggtgct

SEQ ID NO: 232 - RNA, 89 nt, synthetic construct
  misc_feature 1..89: note = Synthetic: Exemplary Spy guide; G017881
  modified_base 1..3: mod_base = OTHER; note = 2'-O-methyl modified nucleotide
  modified_base 1..4: mod_base = OTHER; note = phosphorothioate linkage
  modified_base 87..89: mod_base = OTHER; note = 2'-O-methyl modified nucleotide
  modified_base 86..89: mod_base = OTHER; note = phosphorothioate linkage
  source 1..89: mol_type = other RNA
aaggtatgggtgccaggcaagttttagagctagaaatagcaagttaaaataaggctagtccgttatcaaaatggcaccgagtcggtgct

SEQ ID NO: 233 - RNA, 89 nt, synthetic construct
  misc_feature 1..89: note = Synthetic: Exemplary Spy guide; G017892
  modified_base 1..3: mod_base = OTHER; note = 2'-O-methyl modified nucleotide
  modified_base 1..4: mod_base = OTHER; note = phosphorothioate linkage
  modified_base 87..89: mod_base = OTHER; note = 2'-O-methyl modified nucleotide
  modified_base 86..89: mod_base = OTHER; note = phosphorothioate linkage
  source 1..89: mol_type = other RNA
gttgcctggcacccatacctgttttagagctagaaatagcaagttaaaataaggctagtccgttatcaaaatggcaccgagtcggtgct

SEQ ID NO: 234 - RNA, 89 nt, synthetic construct
  misc_feature 1..89: note = Synthetic: Exemplary Spy guide; G017893
  modified_base 1..3: mod_base = OTHER; note = 2'-O-methyl modified nucleotide
  modified_base 1..4: mod_base = OTHER; note = phosphorothioate linkage
  modified_base 87..89: mod_base = OTHER; note = 2'-O-methyl modified nucleotide
  modified_base 86..89: mod_base = OTHER; note = phosphorothioate linkage
  source 1..89: mol_type = other RNA
gcacccataccttggagcaagttttagagctagaaatagcaagttaaaataaggctagtccgttatcaaaatggcaccgagtcggtgct

SEQ ID NO: 235 - RNA, 89 nt, synthetic construct
  misc_feature 1..89: note = Synthetic: Exemplary Spy guide; G017896
  modified_base 1..3: mod_base = OTHER; note = 2'-O-methyl modified nucleotide
  modified_base 1..4: mod_base = OTHER; note = phosphorothioate linkage
  modified_base 87..89: mod_base = OTHER; note = 2'-O-methyl modified nucleotide
  modified_base 86..89: mod_base = OTHER; note = phosphorothioate linkage
  source 1..89: mol_type = other RNA
ataatctccatcctcgtcctgttttagagctagaaatagcaagttaaaataaggctagtccgttatcaaaatggcaccgagtcggtgct

SEQ ID NO: 236 - RNA, 100 nt, synthetic construct
  misc_feature 1..100: note = Synthetic: Exemplary Spy guide; G018723
  modified_base 1..3: mod_base = OTHER; note = 2'-O-methyl modified nucleotide
  modified_base 1..4: mod_base = OTHER; note = phosphorothioate linkage
  modified_base 29..40: mod_base = OTHER; note = 2'-O-methyl modified nucleotide
  modified_base 69..100: mod_base = OTHER; note = 2'-O-methyl modified nucleotide
  modified_base 97..100: mod_base = OTHER; note = phosphorothioate linkage
  source 1..100: mol_type = other RNA
ccgccgttgctccaaggtatgttttagagctagaaatagcaagttaaaataaggctagtccgttatcaacttgaaaaagtggcaccgagtcggtgctttt

SEQ ID NO: 237 - RNA, 100 nt, synthetic construct
  misc_feature 1..100: note = Synthetic: Exemplary Spy guide; G018726
  modified_base 1..3: mod_base = OTHER; note = 2'-O-methyl modified nucleotide
  modified_base 1..4: mod_base = OTHER; note = phosphorothioate linkage
  modified_base 29..40: mod_base = OTHER; note = 2'-O-methyl modified nucleotide
  modified_base 69..100: mod_base = OTHER; note = 2'-O-methyl modified nucleotide
  modified_base 97..100: mod_base = OTHER; note = phosphorothioate linkage
  source 1..100: mol_type = other RNA
gcacccataccttggagcaagttttagagctagaaatagcaagttaaaataaggctagtccgttatcaacttgaaaaagtggcaccgagtcggtgctttt

SEQ ID NO: 238 - RNA, 146 nt, synthetic construct
  misc_feature 1..146: note = Synthetic: Exemplary Nme guide; plCR012468
  source 1..146: mol_type = other RNA
gggcgcttcgccagccattcctgcgttgtagctccctttctcatttcggaaacgaaatgagaaccgttgctacaataaggccgtctgaaaagatgtgccgcaacgctctgccccttaaagcttctgctttaaggggcatcgtttat

SEQ ID NO: 239 - RNA, 146 nt, synthetic construct
  modified_base 11: mod_base = OTHER; note = thymine
  modified_base 17: mod_base = OTHER; note = thymine
  misc_feature 1..146: note = Synthetic: Exemplary Nme guide; plCR012469
  source 1..146: mol_type = other RNA
gccggggcggtcccggtccaagcggttgtagctccctttctcatttcggaaacgaaatgagaaccgttgctacaataaggccgtctgaaaagatgtgccgcaacgctctgccccttaaagcttctgctttaaggggcatcgtttat

SEQ ID NO: 240 - RNA, 111 nt, synthetic construct
  misc_feature 1..111: note = Synthetic: Exemplary Nme guide; G017564
  modified_base 1..3: mod_base = OTHER; note = 2'-O-methyl modified nucleotide
  modified_base 1..4: mod_base = OTHER; note = phosphorothioate linkage
  modified_base 37..42: mod_base = OTHER; note = phosphorothioate linkage
  modified_base 63..70: mod_base = OTHER; note = 2'-O-methyl modified nucleotide
  modified_base 63..70: mod_base = OTHER; note = phosphorothioate linkage
  modified_base 92..97: mod_base = OTHER; note = 2'-O-methyl modified nucleotide
  modified_base 91..98: mod_base = OTHER; note = phosphorothioate linkage
  modified_base 108..111: mod_base = OTHER; note = phosphorothioate linkage
  modified_base 109..111: mod_base = OTHER; note = 2'-O-methyl modified nucleotide
  source 1..111: mol_type = other RNA
ggcctggctgatgaggccgcacatgttgtagctccctgaaaccgttgctacaataaggccgtctgaaaagatgtgccgcaacgctctgccgcttctgcggcatcgtttatc

SEQ ID NO: 241 - RNA, 107 nt, synthetic construct
  misc_feature 1..107: note = Synthetic: Exemplary Nme guide; G017565
  modified_base 1..3: mod_base = OTHER; note = 2'-O-methyl modified nucleotide
  modified_base 1..4: mod_base = OTHER; note = phosphorothioate linkage
  modified_base 37..42: mod_base = OTHER; note = phosphorothioate linkage
  modified_base 63..70: mod_base = OTHER; note = 2'-O-methyl modified nucleotide
  modified_base 63..70: mod_base = OTHER; note = phosphorothioate linkage
  modified_base 91..94: mod_base = OTHER; note = 2'-O-methyl modified nucleotide
  modified_base 104..107: mod_base = OTHER; note = phosphorothioate linkage
  modified_base 105..107: mod_base = OTHER; note = 2'-O-methyl modified nucleotide
  source 1..107: mol_type = other RNA
ggcctggctgatgaggccgcacatgttgtagctccctgaaaccgttgctacaataaggccgtctgaaaagatgtgccgcaacgctctgccttctggcatcgtttatc

SEQ ID NO: 242 - RNA, 105 nt, synthetic construct
  misc_feature 1..105: note = Synthetic: Exemplary Nme guide; G017566
  modified_base 1..3: mod_base = OTHER; note = 2'-O-methyl modified nucleotide
  modified_base 1..4: mod_base = OTHER; note = phosphorothioate linkage
  modified_base 37..42: mod_base = OTHER; note = phosphorothioate linkage
  modified_base 38..41: mod_base = OTHER; note = 2'-O-methyl modified nucleotide
  modified_base 63..68: mod_base = OTHER; note = phosphorothioate linkage
  modified_base 63..68: mod_base = OTHER; note = 2'-O-methyl modified nucleotide
  modified_base 89..92: mod_base = OTHER; note = phosphorothioate linkage
  modified_base 89..92: mod_base = OTHER; note = 2'-O-methyl modified nucleotide
  modified_base 102..105: mod_base = OTHER; note = phosphorothioate linkage
  modified_base 103..105: mod_base = OTHER; note = 2'-O-methyl modified nucleotide
  source 1..105: mol_type = other RNA
ggcctggctgatgaggccgcacatgttgtagctccctgaaaccgttgctacaataaggccgtcgaaagatgtgccgcaacgctctgccttctggcatcgtttatc

SEQ ID NO: 243 - RNA, 95 nt, synthetic construct
  misc_feature 1..95: note = Synthetic: Exemplary Nme guide; G020362
  modified_base 1..2: mod_base = OTHER; note = 2'-O-methyl modified nucleotide
  modified_base 1..2: mod_base = OTHER; note = phosphorothioate linkage
  modified_base 3..4: mod_base = OTHER; note = phosphorothioate linkage
  modified_base 10: mod_base = OTHER; note = 2'-O-methyl modified nucleotide
  modified_base 13: mod_base = OTHER; note = 2'-O-methyl modified nucleotide
  modified_base 25: mod_base = OTHER; note = 2'-O-methyl modified nucleotide
  modified_base 29..32: mod_base = OTHER; note = 2'-O-methyl modified nucleotide
  modified_base 38: mod_base = OTHER; note = 2'-O-methyl modified nucleotide
  misc_feature 38..39: note = site of internal linker, L1
  modified_base 39: mod_base = OTHER; note = 2'-O-methyl modified nucleotide
  modified_base 45..46: mod_base = OTHER; note = 2'-O-methyl modified nucleotide
  modified_base 49: mod_base = OTHER; note = 2'-O-methyl modified nucleotide
  modified_base 52..54: mod_base = OTHER; note = phosphorothioate linkage
  modified_base 56..57: mod_base = OTHER; note = 2'-O-methyl modified nucleotide
  modified_base 59..61: mod_base = OTHER; note = 2'-O-methyl modified nucleotide
  misc_feature 61..62: note = site of internal linker, L1,
  modified_base 62..64: mod_base = OTHER; note = 2'-O-methyl modified nucleotide
  modified_base 69: mod_base = OTHER; note = 2'-O-methyl modified nucleotide
  modified_base 80..81: mod_base = OTHER; note = 2'-O-methyl modified nucleotide
  misc_feature 82..83: note = site of internal linker, L1
  modified_base 92..93: mod_base = OTHER; note = phosphorothioate linkage
  modified_base 94..95: mod_base = OTHER; note = 2'-O-methyl modified nucleotide
  modified_base 94..95: mod_base = OTHER; note = phosphorothioate linkage
  source 1..95: mol_type = other RNA
ggcctggctgatgaggccgcacatgttgtagctccctcgccgttgctacaataaggccgtcgatgtgccgcaacgctctgccggcatcgtttatt

SEQ ID NO: 244 - RNA, 101 nt, synthetic construct
  misc_feature 1..101: note = Synthetic: Exemplary Nme guide; G021237
  modified_base 1..2: mod_base = OTHER; note = 2'-O-methyl modified nucleotide
  modified_base 1..2: mod_base = OTHER; note = phosphorothioate linkage
  modified_base 10: mod_base = OTHER; note = 2'-O-methyl modified nucleotide
  modified_base 13: mod_base = OTHER; note = 2'-O-methyl modified nucleotide
  modified_base 25: mod_base = OTHER; note = 2'-O-methyl modified nucleotide
  modified_base 29..32: mod_base = OTHER; note = 2'-O-methyl modified nucleotide
  modified_base 37..43: mod_base = OTHER; note = 2'-O-methyl modified nucleotide
  modified_base 47..48: mod_base = OTHER; note = 2'-O-methyl modified nucleotide
  modified_base 51: mod_base = OTHER; note = 2'-O-methyl modified nucleotide
  modified_base 54..55: mod_base = OTHER; note = phosphorothioate linkage
  modified_base 58..59: mod_base = OTHER; note = 2'-O-methyl modified nucleotide
  modified_base 61..70: mod_base = OTHER; note = 2'-O-methyl modified nucleotide
  modified_base 75: mod_base = OTHER; note = 2'-O-methyl modified nucleotide
  modified_base 78..81: mod_base = OTHER; note = 2'-O-methyl modified nucleotide
  modified_base 86..87: mod_base = OTHER; note = 2'-O-methyl modified nucleotide
  modified_base 89..92: mod_base = OTHER; note = 2'-O-methyl modified nucleotide
  modified_base 94: mod_base = OTHER; note = 2'-O-methyl modified nucleotide
  modified_base 96..97: mod_base = OTHER; note = 2'-O-methyl modified nucleotide
  modified_base 98..101: mod_base = OTHER; note = phosphorothioate linkage
  modified_base 99..101: mod_base = OTHER; note = 2'-O-methyl modified nucleotide
  source 1..101: mol_type = other RNA
ggggccagcttcagacacaaatacgttgtagctccctgaaaccgttgctacaataaggccgtcgaaagatgtgccgcaacgctctgccttctggcatcgtt

SEQ ID NO: 245 - RNA, 101 nt, synthetic construct
  misc_feature 1..101: note = Synthetic: Exemplary Nme guide; G021238
  modified_base 1..2: mod_base = OTHER; note = 2'-O-methyl modified nucleotide
  modified_base 1..2: mod_base = OTHER; note = phosphorothioate linkage
  modified_base 10: mod_base = OTHER; note = 2'-O-methyl modified nucleotide
  modified_base 13: mod_base = OTHER; note = 2'-O-methyl modified nucleotide
  modified_base 25: mod_base = OTHER; note = 2'-O-methyl modified nucleotide
  modified_base 29..32: mod_base = OTHER; note = 2'-O-methyl modified nucleotide
  modified_base 37..43: mod_base = OTHER; note = 2'-O-methyl modified nucleotide
  modified_base 47..48: mod_base = OTHER; note = 2'-O-methyl modified nucleotide
  modified_base 51: mod_base = OTHER; note = 2'-O-methyl modified nucleotide
  modified_base 54..55: mod_base = OTHER; note = phosphorothioate linkage
  modified_base 58..59: mod_base = OTHER; note = 2'-O-methyl modified nucleotide
  modified_base 61..70: mod_base = OTHER; note = 2'-O-methyl modified nucleotide
  modified_base 75: mod_base = OTHER; note = 2'-O-methyl modified nucleotide
  modified_base 78..81: mod_base = OTHER; note = 2'-O-methyl modified nucleotide
  modified_base 86..87: mod_base = OTHER; note = 2'-O-methyl modified nucleotide
  modified_base 89..92: mod_base = OTHER; note = 2'-O-methyl modified nucleotide
  modified_base 94: mod_base = OTHER; note = 2'-O-methyl modified nucleotide
  modified_base 96..97: mod_base = OTHER; note = 2'-O-methyl modified nucleotide
  modified_base 98..101: mod_base = OTHER; note = phosphorothioate linkage
  modified_base 99..101: mod_base = OTHER; note = 2'-O-methyl modified nucleotide
  source 1..101: mol_type = other RNA
ttttcacagccaacgactctggccgttgtagctccctgaaaccgttgctacaataaggccgtcgaaagatgtgccgcaacgctctgccttctggcatcgtt

SEQ ID NO: 246 - RNA, 101 nt, synthetic construct
  misc_feature 1..101: note = Synthetic: Exemplary Nme guide; G021247
  modified_base 1..2: mod_base = OTHER; note = 2'-O-methyl modified nucleotide
  modified_base 1..2: mod_base = OTHER; note = phosphorothioate linkage
  modified_base 10: mod_base = OTHER; note = 2'-O-methyl modified nucleotide
  modified_base 13: mod_base = OTHER; note = 2'-O-methyl modified nucleotide
  modified_base 25: mod_base = OTHER; note = 2'-O-methyl modified nucleotide
  modified_base 29..32: mod_base = OTHER; note = 2'-O-methyl modified nucleotide
  modified_base 37..43: mod_base = OTHER; note = 2'-O-methyl modified nucleotide
  modified_base 47..48: mod_base = OTHER; note = 2'-O-methyl modified nucleotide
  modified_base 51: mod_base = OTHER; note = 2'-O-methyl modified nucleotide
  modified_base 54..55: mod_base = OTHER; note = phosphorothioate linkage
  modified_base 58..59: mod_base = OTHER; note = 2'-O-methyl modified nucleotide
  modified_base 61..70: mod_base = OTHER; note = 2'-O-methyl modified nucleotide
  modified_base 75: mod_base = OTHER; note = 2'-O-methyl modified nucleotide
  modified_base 78..81: mod_base = OTHER; note = 2'-O-methyl modified nucleotide
  modified_base 86..87: mod_base = OTHER; note = 2'-O-methyl modified nucleotide
  modified_base 89..92: mod_base = OTHER; note = 2'-O-methyl modified nucleotide
  modified_base 94: mod_base = OTHER; note = 2'-O-methyl modified nucleotide
  modified_base 96..97: mod_base = OTHER; note = 2'-O-methyl modified nucleotide
  modified_base 98..101: mod_base = OTHER; note = phosphorothioate linkage
  modified_base 99..101: mod_base = OTHER; note = 2'-O-methyl modified nucleotide
  source 1..101: mol_type = other RNA
ctgcctcggacagcatccaggactgttgtagctccctgaaaccgttgctacaataaggccgtcgaaagatgtgccgcaacgctctgccttctggcatcgtt

SEQ ID NO: 247 - RNA, 101 nt, synthetic construct
  misc_feature 1..101: note = Synthetic: Exemplary Nme guide; G021256
  modified_base 1..2: mod_base = OTHER; note = 2'-O-methyl modified nucleotide
  modified_base 1..2: mod_base = OTHER; note = phosphorothioate linkage
  modified_base 10: mod_base = OTHER; note = 2'-O-methyl modified nucleotide
  modified_base 13: mod_base = OTHER; note = 2'-O-methyl modified nucleotide
  modified_base 25: mod_base = OTHER; note = 2'-O-methyl modified nucleotide
  modified_base 29..32: mod_base = OTHER; note = 2'-O-methyl modified nucleotide
  modified_base 37..43: mod_base = OTHER; note = 2'-O-methyl modified nucleotide
  modified_base 47..48: mod_base = OTHER; note = 2'-O-methyl modified nucleotide
  modified_base 51: mod_base = OTHER; note = 2'-O-methyl modified nucleotide
  modified_base 54..55: mod_base = OTHER; note = phosphorothioate linkage
  modified_base 58..59: mod_base = OTHER; note = 2'-O-methyl modified nucleotide
  modified_base 61..70: mod_base = OTHER; note = 2'-O-methyl modified nucleotide
  modified_base 75: mod_base = OTHER; note = 2'-O-methyl modified nucleotide
  modified_base 78..81: mod_base = OTHER; note = 2'-O-methyl modified nucleotide
  modified_base 86..87: mod_base = OTHER; note = 2'-O-methyl modified nucleotide
  modified_base 89..92: mod_base = OTHER; note = 2'-O-methyl modified nucleotide
  modified_base 94: mod_base = OTHER; note = 2'-O-methyl modified nucleotide
  modified_base 96..97: mod_base = OTHER; note = 2'-O-methyl modified nucleotide
  modified_base 98..101: mod_base = OTHER; note = phosphorothioate linkage
  modified_base 99..101: mod_base = OTHER; note = 2'-O-methyl modified nucleotide
  source 1..101: mol_type = other RNA
ccaagtgtcttccagtacgatttggttgtagctccctgaaaccgttgctacaataaggccgtcgaaagatgtgccgcaacgctctgccttctggcatcgtt

SEQ ID NO: 248 - RNA, 101 nt, synthetic construct
  misc_feature 1..101: note = Synthetic: Exemplary Nme guide; G021275
  modified_base 1..2: mod_base = OTHER; note = 2'-O-methyl modified nucleotide
  modified_base 1..2: mod_base = OTHER; note = phosphorothioate linkage
  modified_base 10: mod_base = OTHER; note = 2'-O-methyl modified nucleotide
  modified_base 13: mod_base = OTHER; note = 2'-O-methyl modified nucleotide
  modified_base 25: mod_base = OTHER; note = 2'-O-methyl modified nucleotide
  modified_base 29..32: mod_base = OTHER; note = 2'-O-methyl modified nucleotide
  modified_base 37..43: mod_base = OTHER; note = 2'-O-methyl modified nucleotide
  modified_base 47..48: mod_base = OTHER; note = 2'-O-methyl modified nucleotide
  modified_base 51: mod_base = OTHER; note = 2'-O-methyl modified nucleotide
  modified_base 54..55: mod_base = OTHER; note = phosphorothioate linkage
  modified_base 58..59: mod_base = OTHER; note = 2'-O-methyl modified nucleotide
  modified_base 61..70: mod_base = OTHER; note = 2'-O-methyl modified nucleotide
  modified_base 75: mod_base = OTHER; note = 2'-O-methyl modified nucleotide
  modified_base 78..81: mod_base = OTHER; note = 2'-O-methyl modified nucleotide
  modified_base 86..87: mod_base = OTHER; note = 2'-O-methyl modified nucleotide
  modified_base 89..92: mod_base = OTHER; note = 2'-O-methyl modified nucleotide
  modified_base 94: mod_base = OTHER; note = 2'-O-methyl modified nucleotide
  modified_base 96..97: mod_base = OTHER; note = 2'-O-methyl modified nucleotide
  modified_base 98..101: mod_base = OTHER; note = phosphorothioate linkage
  modified_base 99..101: mod_base = OTHER; note = 2'-O-methyl modified nucleotide
  source 1..101: mol_type = other RNA
tctacagcagggctgcctcggacagttgtagctccctgaaaccgttgctacaataaggccgtcgaaagatgtgccgcaacgctctgccttctggcatcgtt

SEQ ID NO: 249 - RNA, 101 nt, synthetic construct
  misc_feature 1..101: note = Synthetic: Exemplary Nme guide; G021320
  modified_base 1..2: mod_base = OTHER; note = 2'-O-methyl modified nucleotide
  modified_base 1..2: mod_base = OTHER; note = phosphorothioate linkage
  modified_base 10: mod_base = OTHER; note = 2'-O-methyl modified nucleotide
  modified_base 13: mod_base = OTHER; note = 2'-O-methyl modified nucleotide
  modified_base 25: mod_base = OTHER; note = 2'-O-methyl modified nucleotide
  modified_base 29..32: mod_base = OTHER; note = 2'-O-methyl modified nucleotide
  modified_base 37..43: mod_base = OTHER; note = 2'-O-methyl modified nucleotide
  modified_base 47..48: mod_base = OTHER; note = 2'-O-methyl modified nucleotide
  modified_base 51: mod_base = OTHER; note = 2'-O-methyl modified nucleotide
  modified_base 54..55: mod_base = OTHER; note = phosphorothioate linkage
  modified_base 58..59: mod_base = OTHER; note = 2'-O-methyl modified nucleotide
  modified_base 61..70: mod_base = OTHER; note = 2'-O-methyl modified nucleotide
  modified_base 75: mod_base = OTHER; note = 2'-O-methyl modified nucleotide
  modified_base 78..81: mod_base = OTHER; note = 2'-O-methyl modified nucleotide
  modified_base 86..87: mod_base = OTHER; note = 2'-O-methyl modified nucleotide
  modified_base 89..92: mod_base = OTHER; note = 2'-O-methyl modified nucleotide
  modified_base 94: mod_base = OTHER; note = 2'-O-methyl modified nucleotide
  modified_base 96..97: mod_base = OTHER; note = 2'-O-methyl modified nucleotide
  modified_base 98..101: mod_base = OTHER; note = phosphorothioate linkage
  modified_base 99..101: mod_base = OTHER; note = 2'-O-methyl modified nucleotide
  source 1..101: mol_type = other RNA
cttcaccaggagaagccgtcacacgttgtagctccctgaaaccgttgctacaataaggccgtcgaaagatgtgccgcaacgctctgccttctggcatcgtt

SEQ ID NO: 250 - RNA, 101 nt, synthetic construct; identical to SEQ ID NO: 249
  misc_feature 1..101: note = Synthetic: Exemplary Nme guide; G021722
  modified_base 1..5: mod_base = OTHER; note = 2'-O-methyl modified nucleotide
  modified_base 1..4: mod_base = OTHER; note = phosphorothioate linkage
  modified_base 8..9: mod_base = OTHER; note = 2'-O-methyl modified nucleotide
  modified_base 11: mod_base = OTHER; note = 2'-O-methyl modified nucleotide
  modified_base 13: mod_base = OTHER; note = 2'-O-methyl modified nucleotide
  modified_base 18: mod_base = OTHER; note = 2'-O-methyl modified nucleotide
  modified_base 22: mod_base = OTHER; note = 2'-O-methyl modified nucleotide
  modified_base 25: mod_base = OTHER; note = 2'-O-methyl modified nucleotide
  modified_base 29..32: mod_base = OTHER; note = 2'-O-methyl modified nucleotide
  modified_base 37..43: mod_base = OTHER; note = 2'-O-methyl modified nucleotide
  modified_base 47..48: mod_base = OTHER; note = 2'-O-methyl modified nucleotide
  modified_base 51: mod_base = OTHER; note = 2'-O-methyl modified nucleotide
  modified_base 54..55: mod_base = OTHER; note = phosphorothioate linkage
  modified_base 58..59: mod_base = OTHER; note = 2'-O-methyl modified nucleotide
  modified_base 61..70: mod_base = OTHER; note = 2'-O-methyl modified nucleotide
  modified_base 75: mod_base = OTHER; note = 2'-O-methyl modified nucleotide
  modified_base 77: mod_base = OTHER; note = 2'-O-methyl modified nucleotide
  modified_base 80: mod_base = OTHER; note = 2'-O-methyl modified nucleotide
  modified_base 86..87: mod_base = OTHER; note = 2'-O-methyl modified nucleotide
  modified_base 89..92: mod_base = OTHER; note = 2'-O-methyl modified nucleotide
  modified_base 99..101: mod_base = OTHER; note = phosphorothioate linkage
  modified_base 100..101: mod_base = OTHER; note = 2'-O-methyl modified nucleotide
  source 1..101: mol_type = other RNA

SEQ ID NO: 251 - RNA, 101 nt, synthetic construct; identical to SEQ ID NO: 249
  misc_feature 1..101: note = Synthetic: Exemplary Nme guide; G021845
  modified_base 1..5: mod_base = OTHER; note = 2'-O-methyl modified nucleotide
  modified_base 1..4: mod_base = OTHER; note = phosphorothioate linkage
  modified_base 8..9: mod_base = OTHER; note = 2'-O-methyl modified nucleotide
  modified_base 11: mod_base = OTHER; note = 2'-O-methyl modified nucleotide
  modified_base 13: mod_base = OTHER; note = 2'-O-methyl modified nucleotide
  modified_base 18: mod_base = OTHER; note = 2'-O-methyl modified nucleotide
  modified_base 22: mod_base = OTHER; note = 2'-O-methyl modified nucleotide
  modified_base 25: mod_base = OTHER; note = 2'-O-methyl modified nucleotide
  modified_base 29..32: mod_base = OTHER; note = 2'-O-methyl modified nucleotide
  modified_base 37..43: mod_base = OTHER; note = 2'-O-methyl modified nucleotide
  modified_base 47..48: mod_base = OTHER; note = 2'-O-methyl modified nucleotide
  modified_base 51: mod_base = OTHER; note = 2'-O-methyl modified nucleotide
  modified_base 54..55: mod_base = OTHER; note = phosphorothioate linkage
  modified_base 58..59: mod_base = OTHER; note = 2'-O-methyl modified nucleotide
  modified_base 61..70: mod_base = OTHER; note = 2'-O-methyl modified nucleotide
  modified_base 75: mod_base = OTHER; note = 2'-O-methyl modified nucleotide
  modified_base 77: mod_base = OTHER; note = 2'-O-methyl modified nucleotide
  modified_base 80: mod_base = OTHER; note = 2'-O-methyl modified nucleotide
  modified_base 86..87: mod_base = OTHER; note = 2'-O-methyl modified nucleotide
  modified_base 89..92: mod_base = OTHER; note = 2'-O-methyl modified nucleotide
  modified_base 99..101: mod_base = OTHER; note = phosphorothioate linkage
  modified_base 100..101: mod_base = OTHER; note = 2'-O-methyl modified nucleotide
  source 1..101: mol_type = other RNA

SEQ ID NO: 252 - RNA, 93 nt, synthetic construct
  misc_feature 1..93: note = Synthetic: Exemplary Nme guide; G021846
  modified_base 1..5: mod_base = OTHER; note = 2'-O-methyl modified nucleotide
  modified_base 1..4: mod_base = OTHER; note = phosphorothioate linkage
  modified_base 8..9: mod_base = OTHER; note = 2'-O-methyl modified nucleotide
  modified_base 11: mod_base = OTHER; note = 2'-O-methyl modified nucleotide
  modified_base 13: mod_base = OTHER; note = 2'-O-methyl modified nucleotide
  modified_base 18: mod_base = OTHER; note = 2'-O-methyl modified nucleotide
  modified_base 22: mod_base = OTHER; note = 2'-O-methyl modified nucleotide
  modified_base 25: mod_base = OTHER; note = 2'-O-methyl modified nucleotide
  modified_base 29..32: mod_base = OTHER; note = 2'-O-methyl modified nucleotide
  modified_base 37..43: mod_base = OTHER; note = 2'-O-methyl modified nucleotide
  modified_base 47..48: mod_base = OTHER; note = 2'-O-methyl modified nucleotide
  modified_base 51: mod_base = OTHER; note = 2'-O-methyl modified nucleotide
  modified_base 54..55: mod_base = OTHER; note = phosphorothioate linkage
  modified_base 58..59: mod_base = OTHER; note = 2'-O-methyl modified nucleotide
  modified_base 61..66: mod_base = OTHER; note = 2'-O-methyl modified nucleotide
  misc_feature 63..64: note = site of internal linker, L1
  modified_base 71: mod_base = OTHER; note = 2'-O-methyl modified nucleotide
  modified_base 73: mod_base = OTHER; note = 2'-O-methyl modified nucleotide
  modified_base 76: mod_base = OTHER; note = 2'-O-methyl modified nucleotide
  modified_base 82: mod_base = OTHER; note = 2'-O-methyl modified nucleotide
  modified_base 83: mod_base = OTHER; note = 2'-O-methyl modified nucleotide
  misc_feature 84..85: note = site of internal linker, L1
  modified_base 91..93: mod_base = OTHER; note = phosphorothioate linkage
  modified_base 92..93: mod_base = OTHER; note = 2'-O-methyl modified nucleotide
  source 1..93: mol_type = other RNA
cttcaccaggagaagccgtcacacgttgtagctcccttcgaccgttgctacaataaggccgtcgatgtgccgcaacgctctgccggcatcgtt

SEQ ID NO: 253 - RNA, 93 nt, synthetic construct
  misc_feature 1..93: note = Synthetic: Exemplary Nme guide; G023420
  modified_base 1..5: mod_base = OTHER; note = 2'-O-methyl modified nucleotide
  modified_base 1..4: mod_base = OTHER; note = phosphorothioate linkage
  modified_base 8..9: mod_base = OTHER; note = 2'-O-methyl modified nucleotide
  modified_base 11: mod_base = OTHER; note = 2'-O-methyl modified nucleotide
  modified_base 13: mod_base = OTHER; note = 2'-O-methyl modified nucleotide
  modified_base 18: mod_base = OTHER; note = 2'-O-methyl modified nucleotide
  modified_base 22: mod_base = OTHER; note = 2'-O-methyl modified nucleotide
  modified_base 25: mod_base = OTHER; note = 2'-O-methyl modified nucleotide
  modified_base 29..32: mod_base = OTHER; note = 2'-O-methyl modified nucleotide
  modified_base 37..43: mod_base = OTHER; note = 2'-O-methyl modified nucleotide
  misc_feature 39..40: note = site of internal linker, L1
  modified_base 47..48: mod_base = OTHER; note = 2'-O-methyl modified nucleotide
  modified_base 51: mod_base = OTHER; note = 2'-O-methyl modified nucleotide
  modified_base 54..55: mod_base = OTHER; note = phosphorothioate linkage
  modified_base 58..59: mod_base = OTHER; note = 2'-O-methyl modified nucleotide
  modified_base 61..66: mod_base = OTHER; note = 2'-O-methyl modified nucleotide
  misc_feature 63..64: note = site of internal linker, L1
  modified_base 71: mod_base = OTHER; note = 2'-O-methyl modified nucleotide
  modified_base 73: mod_base = OTHER; note = 2'-O-methyl modified nucleotide
  modified_base 76: mod_base = OTHER; note = 2'-O-methyl modified nucleotide
  modified_base 82: mod_base = OTHER; note = 2'-O-methyl modified nucleotide
  modified_base 83: mod_base = OTHER; note = 2'-O-methyl modified nucleotide
  misc_feature 84..85: note = site of internal linker, L1
  modified_base 92..93: mod_base = OTHER; note = phosphorothioate linkage
  modified_base 92..93: mod_base = OTHER; note = 2'-O-methyl modified nucleotide
  source 1..93: mol_type = other RNA
cttcaccaagagaagccgtcacacgttgtagctcccttcgaccgttgctacaataaggccgtcgatgtgccgcaacgctctgccggcatcgtt

SEQ ID NO: 254 - RNA, 100 nt, synthetic construct; identical to SEQ ID NO: 204
  misc_feature 1..100: note = Synthetic: Exemplary Spy guide; plG000665
  source 1..100: mol_type = other RNA

SEQ ID NO: 255 - RNA, 115 nt, synthetic construct; identical to SEQ ID NO: 211
  misc_feature 1..115: note = Synthetic: Exemplary Spy guide; plG012746
  source 1..115: mol_type = other RNA

SEQ ID NO: 256 - RNA, 115 nt, synthetic construct; identical to SEQ ID NO: 206
  misc_feature 1..115: note = Synthetic: Exemplary Spy guide; plG012684
  source 1..115: mol_type = other RNA

SEQ ID NO: 257 - RNA, 115 nt, synthetic construct; identical to SEQ ID NO: 207
  misc_feature 1..115: note = Synthetic: Exemplary Spy guide; plG012685
  source 1..115: mol_type = other RNA

SEQ ID NO: 258 - RNA, 115 nt, synthetic construct; identical to SEQ ID NO: 208
  misc_feature 1..115: note = Synthetic: Exemplary Spy guide; plG012686
  source 1..115: mol_type = other RNA

SEQ ID NO: 259 - RNA, 115 nt, synthetic construct; identical to SEQ ID NO: 209
  misc_feature 1..115: note = Synthetic: Exemplary Spy guide; plG012687
  source 1..115: mol_type = other RNA

SEQ ID NO: 260 - RNA, 115 nt, synthetic construct; identical to SEQ ID NO: 210
  misc_feature 1..115: note = Synthetic: Exemplary Spy guide; plG012688
  source 1..115: mol_type = other RNA

SEQ ID NO: 261 - RNA, 24 nt, synthetic construct
  misc_feature 1..24: note = Synthetic: Target sequence of plCR012468
  source 1..24: mol_type = other RNA
tggcgcttcgccagccattcctgc

SEQ ID NO: 262 - RNA, 24 nt, synthetic construct
  misc_feature 1..24: note = Synthetic: Target sequence of plCR012469
  source 1..24: mol_type = other RNA
cccggggcggtcccggtccaagcg

SEQ ID NO: 263 - RNA, 20 nt, synthetic construct
  misc_feature 1..20: note = Synthetic: Target sequence of plG000665
  source 1..20: mol_type = other RNA
ctccctgatggagatgacag

SEQ ID NO: 264 - RNA, 20 nt, synthetic construct
  misc_feature 1..20: note = Synthetic: Target sequence of plG012746
  source 1..20: mol_type = other RNA
caccttggctgtagtcatct

SEQ ID NO: 265 - RNA, 20 nt, synthetic construct
  misc_feature 1..20: note = Synthetic: Target sequence of plG012684
  source 1..20: mol_type = other RNA
cagtgcggttccacacatac

SEQ ID NO: 266 - RNA, 20 nt, synthetic construct
  misc_feature 1..20: note = Synthetic: Target sequence of plG012685
  source 1..20: mol_type = other RNA
aagcctgcatgagctcagtg

SEQ ID NO: 267 - RNA, 20 nt, synthetic construct
  misc_feature 1..20: note = Synthetic: Target sequence of plG012686
  source 1..20: mol_type = other RNA
atgggtcacagacgggtcca

SEQ ID NO: 268 - RNA, 20 nt, synthetic construct
  misc_feature 1..20: note = Synthetic: Target sequence of plG012687
  source 1..20: mol_type = other RNA
ctcaaagagacccatgagat

SEQ ID NO: 269 - RNA, 20 nt, synthetic construct
  misc_feature 1..20: note = Synthetic: Target sequence of plG012688
  source 1..20: mol_type = other RNA
atctcgtatttcatgtctcc

SEQ ID NO: 270-271 - skipped (2 entries)

SEQ ID NO: 272 - RNA, 94 nt, synthetic construct
  misc_feature 1..94: note = Synthetic: Shortened/unmodified NmeCas9 guide RNA comprising linkers
  variation 1..25: note = this sequence encompasses 20-25 n repeating units
  variation 1..25: note = n may be any natural or non-natural nucleotide
  misc_feature 40..41: note = site of internal linker, L1
  misc_feature 64..65: note = site of internal linker, L1
  misc_feature 85..86: note = site of internal linker, L1
  source 1..94: mol_type = other RNA
nnnnnnnnnnnnnnnnnnnnnnnnngttgtagctcccttcgaccgttgctacaataaggccgtcgatgtgccgcaacgctctgccggcatcgtt

SEQ ID NO: 273 - RNA, 69 nt, synthetic construct
  misc_feature 1..69: note = Synthetic: Shortened/modified NmeCas9 guide RNA comprising linkers (conserved portion only)
  modified_base 5..8: mod_base = OTHER; note = 2'-O-methyl modified nucleotide
  modified_base 13..19: mod_base = OTHER; note = 2'-O-methyl modified nucleotide
  misc_feature 15..16: note = site of internal linker, L1
  modified_base 23..24: mod_base = OTHER; note = 2'-O-methyl modified nucleotide
  modified_base 27: mod_base = OTHER; note = 2'-O-methyl modified nucleotide
  modified_base 30..31: mod_base = OTHER; note = phosphorothioate linkage
  modified_base 34..35: mod_base = OTHER; note = 2'-O-methyl modified nucleotide
  modified_base 37..42: mod_base = OTHER; note = 2'-O-methyl modified nucleotide
  misc_feature 39..40: note = site of internal linker, L1
  modified_base 47..49: mod_base = OTHER; note = 2'-O-methyl modified nucleotide
  modified_base 52: mod_base = OTHER; note = 2'-O-methyl modified nucleotide
  modified_base 58..59: mod_base = OTHER; note = 2'-O-methyl modified nucleotide
  misc_feature 60..61: note = site of internal linker, L1
  modified_base 67..69: mod_base = OTHER; note = phosphorothioate linkage
  modified_base 68..69: mod_base = OTHER; note = 2'-O-methyl modified nucleotide
  source 1..69: mol_type = other RNA
gttgtagctcccttcgaccgttgctacaataaggccgtcgatgtgccgcaacgctctgccggcatcgtt

SEQ ID NO: 274 - RNA, 71 nt, synthetic construct
  misc_feature 1..71: note = Synthetic: Shortened/modified NmeCas9 guide RNA comprising linkers (conserved portion only)
  modified_base 5..8: mod_base = OTHER; note = 2'-O-methyl modified nucleotide
  modified_base 14: mod_base = OTHER; note = 2'-O-methyl modified nucleotide
  misc_feature 14..15: note = site of internal linker, L1
  modified_base 21..22: mod_base = OTHER; note = 2'-O-methyl modified nucleotide
  modified_base 25: mod_base = OTHER; note = 2'-O-methyl modified nucleotide
  modified_base 28..30: mod_base = OTHER; note = phosphorothioate linkage
  modified_base 32..33: mod_base = OTHER; note = 2'-O-methyl modified nucleotide
  modified_base 35..40: mod_base = OTHER; note = 2'-O-methyl modified nucleotide
  misc_feature 37..38: note = site of internal linker, L1
  modified_base 45: mod_base = OTHER; note = 2'-O-methyl modified nucleotide
  modified_base 56..57: mod_base = OTHER; note = 2'-O-methyl modified nucleotide
  misc_feature 58..59: note = site of internal linker, L1
  modified_base 68..69: mod_base = OTHER; note = phosphorothioate linkage
  modified_base 70..71: mod_base = OTHER; note = 2'-O-methyl modified nucleotide
  modified_base 70..71: mod_base = OTHER; note = phosphorothioate linkage
  source 1..71: mol_type = other RNA
gttgtagctccctcgccgttgctacaataaggccgtcgatgtgccgcaacgctctgccggcatcgtttatt

SEQ ID NO: 275 - RNA, 69 nt, synthetic construct; identical to SEQ ID NO: 273
  misc_feature 1..69: note = Synthetic: Shortened/modified NmeCas9 guide RNA comprising linkers (conserved portion only)
  modified_base 5..8: mod_base = OTHER; note = 2'-O-methyl modified nucleotide
  modified_base 13..19: mod_base = OTHER; note = 2'-O-methyl modified nucleotide
  misc_feature 15..16: note = site of internal linker, L1
  modified_base 23..24: mod_base = OTHER; note = 2'-O-methyl modified nucleotide
  modified_base 27: mod_base = OTHER; note = 2'-O-methyl modified nucleotide
  modified_base 30..31: mod_base = OTHER; note = phosphorothioate linkage
  modified_base 34..35: mod_base = OTHER; note = 2'-O-methyl modified nucleotide
  modified_base 37..42: mod_base = OTHER; note = 2'-O-methyl modified nucleotide
  misc_feature 39..40: note = site of internal linker, L1
  modified_base 47..49: mod_base = OTHER; note = 2'-O-methyl modified nucleotide
  modified_base 52: mod_base = OTHER; note = 2'-O-methyl modified nucleotide
  modified_base 58..59: mod_base = OTHER; note = 2'-O-methyl modified nucleotide
  misc_feature 60..61: note = site of internal linker, L1
  modified_base 68..69: mod_base = OTHER; note = phosphorothioate linkage
  modified_base 68..69: mod_base = OTHER; note = 2'-O-methyl modified nucleotide
  source 1..69: mol_type = other RNA

SEQ ID NO: 276 - RNA, 93 nt, synthetic construct
  misc_feature 1..93: note = Synthetic: Shortened/modified NmeCas9 guide RNA comprising linkers
  variation 1..24: note = n may be any natural or non-natural nucleotide
  modified_base 1..5: mod_base = OTHER; note = 2'-O-methyl modified nucleotide
  modified_base 1..4: mod_base = OTHER; note = phosphorothioate linkage
  modified_base 8..9: mod_base = OTHER; note = 2'-O-methyl modified nucleotide
  modified_base 11: mod_base = OTHER; note = 2'-O-methyl modified nucleotide
  modified_base 13: mod_base = OTHER; note = 2'-O-methyl modified nucleotide
  modified_base 18: mod_base = OTHER; note = 2'-O-methyl modified nucleotide
  modified_base 22: mod_base = OTHER; note = 2'-O-methyl modified nucleotide
  modified_base 25: mod_base = OTHER; note = 2'-O-methyl modified nucleotide
  modified_base 29..32: mod_base = OTHER; note = 2'-O-methyl modified nucleotide
  modified_base 37..43: mod_base = OTHER; note = 2'-O-methyl modified nucleotide
  misc_feature 39..40: note = site of internal linker, L1
  modified_base 47..48: mod_base = OTHER; note = 2'-O-methyl modified nucleotide
  modified_base 51: mod_base = OTHER; note = 2'-O-methyl modified nucleotide
  modified_base 54..55: mod_base = OTHER; note = phosphorothioate linkage
  modified_base 58..59: mod_base = OTHER; note = 2'-O-methyl modified nucleotide
  modified_base 61..66: mod_base = OTHER; note = 2'-O-methyl modified nucleotide
  misc_feature 63..64: note = site of internal linker, L1
  modified_base 71: mod_base = OTHER; note = 2'-O-methyl modified nucleotide
  modified_base 73: mod_base = OTHER; note = 2'-O-methyl modified nucleotide
  modified_base 76: mod_base = OTHER; note = 2'-O-methyl modified nucleotide
  modified_base 82: mod_base = OTHER; note = 2'-O-methyl modified nucleotide
  modified_base 83: mod_base = OTHER; note = 2'-O-methyl modified nucleotide
  misc_feature 84..85: note = site of internal linker, L1
  modified_base 91..93: mod_base = OTHER; note = phosphorothioate linkage
  modified_base 92..93: mod_base = OTHER; note = 2'-O-methyl modified nucleotide
  source 1..93: mol_type = other RNA
nnnnnnnnnnnnnnnnnnnnnnnngttgtagctcccttcgaccgttgctacaataaggccgtcgatgtgccgcaacgctctgccggcatcgtt

SEQ ID NO: 277 - RNA, 94 nt, synthetic construct
  misc_feature 1..94: note = Synthetic: Shortened/modified NmeCas9 guide RNA comprising linkers
  variation 1..23: note = n may be any natural or non-natural nucleotide
  modified_base 1..2: mod_base = OTHER; note = 2'-O-methyl modified nucleotide
  modified_base 1..2: mod_base = OTHER; note = phosphorothioate linkage
  modified_base 3..4: mod_base = OTHER; note = phosphorothioate linkage
  modified_base 10: mod_base = OTHER; note = 2'-O-methyl modified nucleotide
  modified_base 13: mod_base = OTHER; note = 2'-O-methyl modified nucleotide
  modified_base 24: mod_base = OTHER; note = 2'-O-methyl modified nucleotide
  modified_base 28..31: mod_base = OTHER; note = 2'-O-methyl modified nucleotide
  modified_base 37: mod_base = OTHER; note = 2'-O-methyl modified nucleotide
  misc_feature 37..38: note = site of internal linker, L1
  modified_base 38: mod_base = OTHER; note = 2'-O-methyl modified nucleotide
  modified_base 44: mod_base = OTHER; note = 2'-O-methyl modified nucleotide
  modified_base 45: mod_base = OTHER; note = 2'-O-methyl modified nucleotide
  modified_base 48: mod_base = OTHER; note = 2'-O-methyl modified nucleotide
  modified_base 51..53: mod_base = OTHER; note = phosphorothioate linkage
  modified_base 55..56: mod_base = OTHER; note = 2'-O-methyl modified nucleotide
  modified_base 58..63: mod_base = OTHER; note = 2'-O-methyl modified nucleotide
  misc_feature 60..61: note = site of internal linker, L1
  modified_base 68: mod_base = OTHER; note = 2'-O-methyl modified nucleotide
  modified_base 79: mod_base = OTHER; note = 2'-O-methyl modified nucleotide
  modified_base 80: mod_base = OTHER; note = 2'-O-methyl modified nucleotide
  modified_base 81..82: mod_base = OTHER; note = 2'-O-methyl modified nucleotide
  modified_base 91..92: mod_base = OTHER; note = phosphorothioate linkage
  modified_base 93..94: mod_base = OTHER; note = phosphorothioate linkage
  modified_base 93..94: mod_base = OTHER; note = 2'-O-methyl modified nucleotide
  source 1..94: mol_type = other RNA
nnnnnnnnnnnnnnnnnnnnnnngttgtagctccctcgccgttgctacaataaggccgtcgatgtgccgcaacgctctgccggcatcgtttatt

SEQ ID NO: 278 - RNA, 93 nt, synthetic construct; identical to SEQ ID NO: 276
  misc_feature 1..93: note = Synthetic: Shortened/modified NmeCas9 guide RNA comprising linkers
  variation 1..24: note = n may be any natural or non-natural nucleotide
  modified_base 1..5: mod_base = OTHER; note = 2'-O-methyl modified nucleotide
  modified_base 1..4: mod_base = OTHER; note = phosphorothioate linkage
  modified_base 8..9: mod_base = OTHER; note = 2'-O-methyl modified nucleotide
  modified_base 11: mod_base = OTHER; note = 2'-O-methyl modified nucleotide
  modified_base 13: mod_base = OTHER; note = 2'-O-methyl modified nucleotide
  modified_base 18: mod_base = OTHER; note = 2'-O-methyl modified nucleotide
  modified_base 22: mod_base = OTHER; note = 2'-O-methyl modified nucleotide
  modified_base 25: mod_base = OTHER; note = 2'-O-methyl modified nucleotide
  modified_base 29..32: mod_base = OTHER; note = 2'-O-methyl modified nucleotide
  modified_base 37..43: mod_base = OTHER; note = 2'-O-methyl modified nucleotide
  misc_feature 39..40: note = site of internal linker, L1
  modified_base 47..48: mod_base = OTHER; note = 2'-O-methyl modified nucleotide
  modified_base 51: mod_base = OTHER; note = 2'-O-methyl modified nucleotide
  modified_base 54..55: mod_base = OTHER; note = phosphorothioate linkage
  modified_base 58..59: mod_base = OTHER; note = 2'-O-methyl modified nucleotide
  modified_base 61..66: mod_base = OTHER; note = 2'-O-methyl modified nucleotide
  misc_feature 63..64: note = site of internal linker, L1
  modified_base 71: mod_base = OTHER; note = 2'-O-methyl modified nucleotide
  modified_base 73: mod_base = OTHER; note = 2'-O-methyl modified nucleotide
  modified_base 76: mod_base = OTHER; note = 2'-O-methyl modified nucleotide
  modified_base 82: mod_base = OTHER; note = 2'-O-methyl modified nucleotide
  modified_base 83: mod_base = OTHER; note = 2'-O-methyl modified nucleotide
  misc_feature 84..85: note = site of internal linker, L1
  modified_base 92..93: mod_base = OTHER; note = phosphorothioate linkage
  modified_base 92..93: mod_base = OTHER; note = 2'-O-methyl modified nucleotide
  source 1..93: mol_type = other RNA

SEQ ID NO: 279 - RNA, 145 nt, synthetic construct
  misc_feature 1..145: note = Synthetic: Exemplary NmeCas9 sgRNA-1
  variation 1..24: note = n may be any natural or non-natural nucleotide
  source 1..145: mol_type = other RNA
nnnnnnnnnnnnnnnnnnnnnnnngttgtagctccctttctcatttcggaaacgaaatgagaaccgttgctacaataaggccgtctgaaaagatgtgccgcaacgctctgccccttaaagcttctgctttaaggggcatcgttta

SEQ ID NO: 280 - RNA, 121 nt, synthetic construct
  misc_feature 1..121: note = Synthetic: Exemplary Nme Guide RNA Conserved Region only- unmodified sequence
  source 1..121: mol_type = other RNA
gttgtagctccctttctcatttcggaaacgaaatgagaaccgttgctacaataaggccgtctgaaaagatgtgccgcaacgctctgccccttaaagcttctgctttaaggggcatcgttta

SEQ ID NO: 281 - RNA, 77 nt, synthetic construct
  misc_feature 1..77: note = Synthetic: Exemplary Nme Guide RNA Conserved Region only- unmodified sequence
  source 1..77: mol_type = other RNA
gttgtagctccctgaaaccgttgctacaataaggccgtcgaaagatgtgccgcaacgctctgccttctggcatcgtt

SEQ ID NO: 282 - RNA, 81 nt, synthetic construct
  misc_feature 1..81: note = Synthetic: Exemplary Nme Guide RNA Conserved Region only- unmodified sequence
  source 1..81: mol_type = other RNA
gttgtagctcccttcgaaagaccgttgctacaataaggccgtcgaaagatgtgccgcaacgctctgccttctggcatcgtt

SEQ ID NO: 283 - RNA, 83 nt, synthetic construct
  misc_feature 1..83: note = Synthetic: Exemplary Nme Guide RNA Conserved Region only- unmodified sequence
  source 1..83: mol_type = other RNA
gttgtagctccctggaaacccgttgctacaataaggccgtcgaaagatgtgccgcaacgctctgccttctggcatcgtttatt

SEQ ID NO: 284 - RNA, 77 nt, synthetic construct; identical to SEQ ID NO: 281
  misc_feature 1..77: note = Synthetic: Exemplary Modified Nme Guide RNA Motifs
  modified_base 1: mod_base = OTHER; note = 2'-O-methyl modified nucleotide
  modified_base 5..8: mod_base = OTHER; note = 2'-O-methyl modified nucleotide
  modified_base 13..19: mod_base = OTHER; note = 2'-O-methyl modified nucleotide
  modified_base 23..24: mod_base = OTHER; note = 2'-O-methyl modified nucleotide
  modified_base 27: mod_base = OTHER; note = 2'-O-methyl modified nucleotide
  modified_base 30..31: mod_base = OTHER; note = phosphorothioate linkage
  modified_base 34..35: mod_base = OTHER; note = 2'-O-methyl modified nucleotide
  modified_base 37..46: mod_base = OTHER; note = 2'-O-methyl modified nucleotide
  modified_base 51: mod_base = OTHER; note = 2- O-methyl modified nucleotide
  modified_base 54..57: mod_base = OTHER; note = 2'-O-methyl modified nucleotide
  modified_base 62..63: mod_base = OTHER; note = 2'-O-methyl modified nucleotide
  modified_base 65..68: mod_base = OTHER; note = 2'-O-methyl modified nucleotide
  modified_base 70: mod_base = OTHER; note = 2'-O-methyl modified nucleotide
  modified_base 72..73: mod_base = OTHER; note = 2'-O-methyl modified nucleotide
  modified_base 75..77: mod_base = OTHER; note = phosphorothioate linkage
  modified_base 75..76: mod_base = OTHER; note = 2'-O-methyl modified nucleotide
  source 1..77: mol_type = other RNA

SEQ ID NO: 285 - RNA, 77 nt, synthetic construct; identical to SEQ ID NO: 281
  misc_feature 1..77: note = Synthetic: Exemplary Modified Nme Guide RNA Motifs
  modified_base 1: mod_base = OTHER; note = 2'-O-methyl modified nucleotide
  modified_base 13..19: mod_base = OTHER; note = 2'-O-methyl modified nucleotide
  modified_base 23..24: mod_base = OTHER; note = 2'-O-methyl modified nucleotide
  modified_base 27: mod_base = OTHER; note = 2'-O-methyl modified nucleotide
  modified_base 30..31: mod_base = OTHER; note = phosphorothioate linkage
  modified_base 34..35: mod_base = OTHER; note = 2'-O-methyl modified nucleotide
  modified_base 37..42: mod_base = OTHER; note = 2'-O-methyl modified nucleotide
  modified_base 47..49: mod_base = OTHER; note = 2'-O-methyl modified nucleotide
  modified_base 52: mod_base = OTHER; note = 2'-O-methyl modified nucleotide
  modified_base 58..59: mod_base = OTHER; note = 2'-O-methyl modified nucleotide
  modified_base 67..69: mod_base = OTHER; note = phosphorothioate linkage
  modified_base 68..69: mod_base = OTHER; note = 2'-O-methyl modified nucleotide
  source 1..77: mol_type = other RNA

SEQ ID NO: 286 - RNA, 77 nt, synthetic construct; identical to SEQ ID NO: 281
  misc_feature 1..77: note = Synthetic: Exemplary Modified Nme Guide RNA Motifs
  modified_base 1: mod_base = OTHER; note = 2'-O-methyl modified nucleotide
  modified_base 5..8: mod_base = OTHER; note = 2'-O-methyl modified nucleotide
  modified_base 13..19: mod_base = OTHER; note = 2'-O-methyl modified nucleotide
  modified_base 23..24: mod_base = OTHER; note = 2'-O-methyl modified nucleotide
  modified_base 27: mod_base = OTHER; note = 2'-O-methyl modified nucleotide
  modified_base 34..35: mod_base = OTHER; note = 2'-O-methyl modified nucleotide
  modified_base 37..46: mod_base = OTHER; note = 2'-O-methyl modified nucleotide
  modified_base 51: mod_base = OTHER; note = 2'-O-methyl modified nucleotide
  modified_base 53: mod_base = OTHER; note = 2'-O-methyl modified nucleotide
  modified_base 56: mod_base = OTHER; note = 2'-O-methyl modified nucleotide
  modified_base 62..63: mod_base = OTHER; note = 2'-O-methyl modified nucleotide
  modified_base 65..68: mod_base = OTHER; note = 2'-O-methyl modified nucleotide
  modified_base 75..77: mod_base = OTHER; note = phosphorothioate linkage
  modified_base 76..77: mod_base = OTHER; note = 2'-O-methyl modified nucleotide
  source 1..77: mol_type = other RNA

SEQ ID NO: 287 - RNA, 77 nt, synthetic construct; identical to SEQ ID NO: 281
  misc_feature 1..77: note = Synthetic: Exemplary Modified Nme Guide RNA Motifs
  modified_base 1: mod_base = OTHER; note = 2'-O-methyl modified nucleotide
  modified_base 5..8: mod_base = OTHER; note = 2'-O-methyl modified nucleotide
  modified_base 13..19: mod_base = OTHER; note = 2'-O-methyl modified nucleotide
  modified_base 23..24: mod_base = OTHER; note = 2'-O-methyl modified nucleotide
  modified_base 27: mod_base = OTHER; note = 2'-O-methyl modified nucleotide
  modified_base 30..31: mod_base = OTHER; note = phosphorothioate linkage
  modified_base 34..35: mod_base = OTHER; note = 2'-O-methyl modified nucleotide
  modified_base 37..46: mod_base = OTHER; note = 2'-O-methyl modified nucleotide
  modified_base 51: mod_base = OTHER; note = 2'-O-methyl modified nucleotide
  modified_base 53: mod_base = OTHER; note = 2'-O-methyl modified nucleotide
  modified_base 56: mod_base = OTHER; note = 2'-O-methyl modified nucleotide
  modified_base 58..63: mod_base = OTHER; note = 2'-O-methyl modified nucleotide
  modified_base 65..68: mod_base = OTHER; note = 2'-O-methyl modified nucleotide
  modified_base 75..77: mod_base = OTHER; note = phosphorothioate linkage
  modified_base 76..77: mod_base = OTHER; note = 2'-O-methyl modified nucleotide
  source 1..77: mol_type = other RNA

SEQ ID NO: 288 - RNA, 77 nt, synthetic construct; identical to SEQ ID NO: 281
  misc_feature 1..77: note = Synthetic: Exemplary Modified Nme Guide RNA Motifs
  modified_base 1: mod_base = OTHER; note = 2'-O-methyl modified nucleotide
  modified_base 5..8: mod_base = OTHER; note = 2'-O-methyl modified nucleotide
  modified_base 13..19: mod_base = OTHER; note = 2'-O-methyl modified nucleotide
  modified_base 23..24: mod_base = OTHER; note = 2'-O-methyl modified nucleotide
  modified_base 27: mod_base = OTHER; note = 2'-O-methyl modified nucleotide
  modified_base 34..35: mod_base = OTHER; note = 2'-O-methyl modified nucleotide
  modified_base 37..46: mod_base = OTHER; note = 2'-O-methyl modified nucleotide
  modified_base 51: mod_base = OTHER; note = 2'-O-methyl modified nucleotide
  modified_base 53: mod_base = OTHER; note = 2'-O-methyl modified nucleotide
  modified_base 56: mod_base = OTHER; note = 2'-O-methyl modified nucleotide
  modified_base 58..63: mod_base = OTHER; note = 2'-O-methyl modified nucleotide
  modified_base 65..68: mod_base = OTHER; note = 2'-O-methyl modified nucleotide
  modified_base 75..77: mod_base = OTHER; note = phosphorothioate linkage
  modified_base 76..77: mod_base = OTHER; note = 2'-O-methyl modified nucleotide
  source 1..77: mol_type = other RNA

SEQ ID NO: 289 - RNA, 81 nt, synthetic construct; identical to SEQ ID NO: 282
  misc_feature 1..81: note = Synthetic: Exemplary Modified Nme Guide RNA Motifs
  modified_base 1: mod_base = OTHER; note = 2'-O-methyl modified nucleotide
  modified_base 5..8: mod_base = OTHER; note = 2'-O-methyl modified nucleotide
  modified_base 13..23: mod_base = OTHER; note = 2'-O-methyl modified nucleotide
  modified_base 27..28: mod_base = OTHER; note = 2'-O-methyl modified nucleotide
  modified_base 31: mod_base = OTHER; note = 2'-O-methyl modified nucleotide
  modified_base 34..35: mod_base = OTHER; note = phosphorothioate linkage
  modified_base 38..39: mod_base = OTHER; note = 2'-O-methyl modified nucleotide
  modified_base 41..50: mod_base = OTHER; note = 2'-O-methyl modified nucleotide
  modified_base 55: mod_base = OTHER; note = 2'-O-methyl modified nucleotide
  modified_base 57: mod_base = OTHER; note = 2'-O-methyl modified nucleotide
  modified_base 60: mod_base = OTHER; note = 2'-O-methyl modified nucleotide
  modified_base 66..72: mod_base = OTHER; note = 2'-O-methyl modified nucleotide
  modified_base 79..81: mod_base = OTHER; note = phosphorothioate linkage
  modified_base 80..81: mod_base = OTHER; note = 2'-O-methyl modified nucleotide
  source 1..81: mol_type = other RNA

SEQ ID NO: 290 - RNA, 81 nt, synthetic construct; identical to SEQ ID NO: 282
  misc_feature 1..81: note = Synthetic: Exemplary Modified Nme Guide RNA Motifs
  modified_base 1: mod_base = OTHER; note = 2'-O-methyl modified nucleotide
  modified_base 5..8: mod_base = OTHER; note = 2'-O-methyl modified nucleotide
  modified_base 13..23: mod_base = OTHER; note = 2'-O-methyl modified nucleotide
  modified_base 27..28: mod_base = OTHER; note = 2'-O-methyl modified nucleotide
  modified_base 31: mod_base = OTHER; note = 2'-O-methyl modified nucleotide
  modified_base 38..39: mod_base = OTHER; note = 2'-O-methyl modified nucleotide
  modified_base 41..50: mod_base = OTHER; note = 2'-O-methyl modified nucleotide
  modified_base 55: mod_base = OTHER; note = 2'-O-methyl modified nucleotide
  modified_base 57: mod_base = OTHER; note = 2'-O-methyl modified nucleotide
  modified_base 60: mod_base = OTHER; note = 2'-O-methyl modified nucleotide
  modified_base 66..72: mod_base = OTHER; note = 2'-O-methyl modified nucleotide
  modified_base 79..81: mod_base = OTHER; note = phosphorothioate linkage
  modified_base 80..81: mod_base = OTHER; note = 2'-O-methyl modified nucleotide
  source 1..81: mol_type = other RNA

SEQ ID NO: 291 - RNA, 81 nt, synthetic construct; identical to SEQ ID NO: 282
  misc_feature 1..81: note = Synthetic: Exemplary Modified Nme Guide RNA Motifs
  modified_base 1: mod_base = OTHER; note = 2'-O-methyl modified nucleotide
  modified_base 5..8: mod_base = OTHER; note = 2'-O-methyl modified nucleotide
  modified_base 13..23: mod_base = OTHER; note = 2'-O-methyl modified nucleotide
  modified_base 27..28: mod_base = OTHER; note = 2'-O-methyl modified nucleotide
  modified_base 31: mod_base = OTHER; note = 2'-O-methyl modified nucleotide
  modified_base 34..35: mod_base = OTHER; note = phosphorothioate linkage
  modified_base 38..39: mod_base = OTHER; note = 2'-O-methyl modified nucleotide
  modified_base 41..50: mod_base = OTHER; note = 2'-O-methyl modified nucleotide
  modified_base 55: mod_base = OTHER; note = 2'-O-methyl modified nucleotide
  modified_base 57: mod_base = OTHER; note = 2'-O-methyl modified nucleotide
  modified_base 60: mod_base = OTHER; note = 2'-O-methyl modified nucleotide
  modified_base 62..72: mod_base = OTHER; note = 2'-O-methyl modified nucleotide
  modified_base 79..81: mod_base = OTHER; note = phosphorothioate linkage
  modified_base 80..81: mod_base = OTHER; note = 2'-O-methyl modified nucleotide
  source 1..81: mol_type = other RNA

SEQ ID NO: 292 - RNA, 81 nt, synthetic construct; identical to SEQ ID NO: 282
  misc_feature 1..81: note = Synthetic: Exemplary Modified Nme Guide RNA Motifs
  modified_base 1: mod_base = OTHER; note = 2'-O-methyl modified nucleotide
  modified_base 5..8: mod_base = OTHER; note = 2'-O-methyl modified nucleotide
  modified_base 13..23: mod_base = OTHER; note = 2'-O-methyl modified nucleotide
  modified_base 27..28: mod_base = OTHER; note = 2'-O-methyl modified nucleotide
  modified_base 31: mod_base = OTHER; note = 2'-O-methyl modified nucleotide
  modified_base 38..39: mod_base = OTHER; note = 2'-O-methyl modified nucleotide
  modified_base 41..50: mod_base = OTHER; note = 2'-O-methyl modified nucleotide
  modified_base 55: mod_base = OTHER; note = 2'-O-methyl modified nucleotide
  modified_base 57: mod_base = OTHER; note = 2'-O-methyl modified nucleotide
  modified_base 60: mod_base = OTHER; note = 2'-O-methyl modified nucleotide
  modified_base 62..72: mod_base = OTHER; note = 2'-O-methyl modified nucleotide
  modified_base 79..81: mod_base = OTHER; note = phosphorothioate linkage
  modified_base 80..81: mod_base = OTHER; note = 2'-O-methyl modified nucleotide
  source 1..81: mol_type = other RNA

SEQ ID NO: 293 - RNA, 101 nt, synthetic construct
  misc_feature 1..101: note = Synthetic: Exemplary Modified Nme Guide RNA Motifs
  variation 1..24: note = n may be any natural or non-natural nucleotide
  modified_base 1..2: mod_base = OTHER; note = 2'-O-methyl modified nucleotide
  modified_base 10: mod_base = OTHER; note = 2'-O-methyl modified nucleotide
  modified_base 13: mod_base = OTHER; note = 2'-O-methyl modified nucleotide
  modified_base 25: mod_base = OTHER; note = 2'-O-methyl modified nucleotide
  modified_base 29..32: mod_base = OTHER; note = 2'-O-methyl modified nucleotide
  modified_base 37..43: mod_base = OTHER; note = 2'-O-methyl modified nucleotide
  modified_base 47..48: mod_base = OTHER; note = 2'-O-methyl modified nucleotide
  modified_base 51: mod_base = OTHER; note = 2'-O-methyl modified nucleotide
  modified_base 54..55: mod_base = OTHER; note = phosphorothioate linkage
  modified_base 58..59: mod_base = OTHER; note = 2'-O-methyl modified nucleotide
  modified_base 61..70: mod_base = OTHER; note = 2'-O-methyl modified nucleotide
  modified_base 75: mod_base = OTHER; note = 2'-O-methyl modified nucleotide
  modified_base 78..81: mod_base = OTHER; note = 2'-O-methyl modified nucleotide
  modified_base 86..87: mod_base = OTHER; note = 2'-O-methyl modified nucleotide
  modified_base 89..92: mod_base = OTHER; note = 2'-O-methyl modified nucleotide
  modified_base 94: mod_base = OTHER; note = 2'-O-methyl modified nucleotide
  modified_base 96..97: mod_base = OTHER; note = 2'-O-methyl modified nucleotide
  modified_base 98..101: mod_base = OTHER; note = phosphorothioate linkage
  modified_base 99..101: mod_base = OTHER; note = 2'-O-methyl modified nucleotide
  source 1..101: mol_type = other RNA
nnnnnnnnnnnnnnnnnnnnnnnngttgtagctccctgaaaccgttgctacaataaggccgtcgaaagatgtgccgcaacgctctgccttctggcatcgtt

SEQ ID NO: 294 - RNA, 102 nt, synthetic construct
  misc_feature 1..102: note = Synthetic: Exemplary Modified Nme Guide RNA Motifs
  modified_base 30..33: mod_base = OTHER; note = 2'-O-methyl modified nucleotide
  modified_base 38..44: mod_base = OTHER; note = 2'-O-methyl modified nucleotide
  modified_base 48..49: mod_base = OTHER; note = 2'-O-methyl modified nucleotide
  modified_base 52: mod_base = OTHER; note = 2'-O-methyl modified nucleotide
  modified_base 55..56: mod_base = OTHER; note = phosphorothioate linkage
  modified_base 59..60: mod_base = OTHER; note = 2'-O-methyl modified nucleotide
  modified_base 62..71: mod_base = OTHER; note = 2'-O-methyl modified nucleotide
  modified_base 76: mod_base = OTHER; note = 2'-O-methyl modified nucleotide
  modified_base 79..82: mod_base = OTHER; note = 2'-O-methyl modified nucleotide
  modified_base 87..88: mod_base = OTHER; note = 2'-O-methyl modified nucleotide
  modified_base 90..93: mod_base = OTHER; note = 2'-O-methyl modified nucleotide
  modified_base 95: mod_base = OTHER; note = 2'-O-methyl modified nucleotide
  modified_base 97..98: mod_base = OTHER; note = 2'-O-methyl modified nucleotide
  modified_base 100..102: mod_base = OTHER; note = 2'-O-methyl modified nucleotide
  modified_base 99..102: mod_base = OTHER; note = phosphorothioate linkage
  variation 1..25: note = this sequence encompasses 20-25 n repeating units
  variation 1..25: note = n may be any natural or non-natural nucleotide
  source 1..102: mol_type = other RNA
nnnnnnnnnnnnnnnnnnnnnnnnngttgtagctccctgaaaccgttgctacaataaggccgtcgaaagatgtgccgcaacgctctgccttctggcatcgtt

SEQ ID NO: 295 - RNA, 101 nt, synthetic construct; identical to SEQ ID NO: 293
  misc_feature 1..101: note = Synthetic: Exemplary Modified Nme Guide RNA Motifs
  modified_base 1..5: mod_base = OTHER; note = 2'-O-methyl modified nucleotide
  modified_base 1..4: mod_base = OTHER; note = phosphorothioate linkage
  modified_base 8..9: mod_base = OTHER; note = 2'-O-methyl modified nucleotide
  modified_base 11: mod_base = OTHER; note = 2'-O-methyl modified nucleotide
  modified_base 13: mod_base = OTHER; note = 2'-O-methyl modified nucleotide
  modified_base 18: mod_base = OTHER; note = 2'-O-methyl modified nucleotide
  modified_base 22: mod_base = OTHER; note = 2'-O-methyl modified nucleotide
  modified_base 25: mod_base = OTHER; note = 2'-O-methyl modified nucleotide
  modified_base 29..32: mod_base = OTHER; note = 2'-O-methyl modified nucleotide
  modified_base 37..43: mod_base = OTHER; note = 2'-O-methyl modified nucleotide
  modified_base 47..48: mod_base = OTHER; note = 2'-O-methyl modified nucleotide
  modified_base 51: mod_base = OTHER; note = 2'-O-methyl modified nucleotide
  modified_base 54..55: mod_base = OTHER; note = phosphorothioate linkage
  modified_base 58..59: mod_base = OTHER; note = 2'-O-methyl modified nucleotide
  modified_base 61..70: mod_base = OTHER; note = 2'-O-methyl modified nucleotide
  modified_base 75: mod_base = OTHER; note = 2'-O-methyl modified nucleotide
  modified_base 77: mod_base = OTHER; note = 2'-O-methyl modified nucleotide
  modified_base 80: mod_base = OTHER; note = 2'-O-methyl modified nucleotide
  modified_base 86..87: mod_base = OTHER; note = 2'-O-methyl modified nucleotide
  modified_base 89..92: mod_base = OTHER; note = 2'-O-methyl modified nucleotide
  modified_base 100..101: mod_base = OTHER; note = 2'-O-methyl modified nucleotide
  modified_base 99..101: mod_base = OTHER; note = phosphorothioate linkage
  variation 1..24: note = n may be any natural or non-natural nucleotide
  source 1..101: mol_type = other RNA

SEQ ID NO: 296 - RNA, 111 nt, synthetic construct
  misc_feature 1..111: note = Synthetic: Exemplary Modified Nme Guide RNA Motifs
  modified_base 1..3: mod_base = OTHER; note = 2'-O-methyl modified nucleotide
  modified_base 1..4: mod_base = OTHER; note = phosphorothioate linkage
  modified_base 37..42: mod_base = OTHER; note = phosphorothioate linkage
  modified_base 38..41: mod_base = OTHER; note = 2'-O-methyl modified nucleotide
  modified_base 63..70: mod_base = OTHER; note = 2'-O-methyl modified nucleotide
  modified_base 63..70: mod_base = OTHER; note = phosphorothioate linkage
  modified_base 91..98: mod_base = OTHER; note = phosphorothioate linkage
  modified_base 92..97: mod_base = OTHER; note = 2'-O-methyl modified nucleotide
  modified_base 108..111: mod_base = OTHER; note = phosphorothioate linkage
  modified_base 109..111: mod_base = OTHER; note = 2'-O-methyl modified nucleotide
  variation 1..24: note = n may be any natural or non-natural nucleotide
  source 1..111: mol_type = other RNA
nnnnnnnnnnnnnnnnnnnnnnnngttgtagctccctgaaaccgttgctacaataaggccgtctgaaaagatgtgccgcaacgctctgccgcttctgcggcatcgtttatc

SEQ ID NO: 297 - RNA, 105 nt, synthetic construct
  misc_feature 1..105: note = Synthetic: Exemplary Modified Nme Guide RNA Motifs
  modified_base 1..3: mod_base = OTHER; note = 2'-O-methyl modified nucleotide
  modified_base 1..4: mod_base = OTHER; note = phosphorothioate linkage
  modified_base 37..42: mod_base = OTHER; note = phosphorothioate linkage
  modified_base 38..41: mod_base = OTHER; note = 2'-O-methyl modified nucleotide
  modified_base 63..68: mod_base = OTHER; note = 2'-O-methyl modified nucleotide
  modified_base 63..68: mod_base = OTHER; note = phosphorothioate linkage
  modified_base 89..92: mod_base = OTHER; note = phosphorothioate linkage
  modified_base 92: mod_base = OTHER; note = 2'-O-methyl modified nucleotide
  modified_base 102..105: mod_base = OTHER; note = phosphorothioate linkage
  modified_base 103..105: mod_base = OTHER; note = 2'-O-methyl modified nucleotide
  variation 1..20: note = n may be any natural or non-natural nucleotide
  source 1..105: mol_type = other RNA
nnnnnnnnnnnnnnnnnnnnnnnngttgtagctccctgaaaccgttgctacaataaggccgtcgaaagatgtgccgcaacgctctgccttctggcatcgtttatc

SEQ ID NO: 298-300 - skipped (3 entries)

SEQ ID NO: 301 - protein, 16 aa, synthetic construct
  REGION 1..16: note = Synthetic: Exemplary XTEN
SGSETPGTSESATPES

SEQ ID NO: 302 - protein, 12 aa, synthetic construct
  REGION 1..12: note = Synthetic: Exemplary XTEN
SGSETPGTSESA

SEQ ID NO: 303 - protein, 21 aa, synthetic construct
  REGION 1..21: note = Synthetic: Exemplary XTEN
SGSETPGTSESATPEGGSGGS

SEQ ID NO: 304 - skipped

SEQ ID NO: 305 - protein, 5 aa, synthetic construct
  REGION 1..5: note = Synthetic: amino acid sequence for exemplary linker
GGGGS

SEQ ID NO: 306 - protein, 5 aa, synthetic construct
  REGION 1..5: note = Synthetic: amino acid sequence for exemplary linker
EAAAK

SEQ ID NO: 307 - protein, 5 aa, synthetic construct
  REGION 1..5: note = Synthetic: amino acid sequence for exemplary linker
SEGSA

SEQ ID NO: 308 - protein, 9 aa, synthetic construct
  REGION 1..9: note = Synthetic: amino acid sequence for exemplary linker
SEGSAGTST

SEQ ID NO: 309 - protein, 10 aa, synthetic construct
  REGION 1..10: note = Synthetic: amino acid sequence for exemplary linker
GGGGSGGGGS

SEQ ID NO: 310 - protein, 10 aa, synthetic construct
  REGION 1..10: note = Synthetic: amino acid sequence for exemplary linker
GGGGSEAAAK

SEQ ID NO: 311 - protein, 10 aa, synthetic construct
  REGION 1..10: note = Synthetic: amino acid sequence for exemplary linker
EAAAKGGGGS

SEQ ID NO: 312 - protein, 10 aa, synthetic construct
  REGION 1..10: note = Synthetic: amino acid sequence for exemplary linker
EAAAKEAAAK

SEQ ID NO: 313 - protein, 15 aa, synthetic construct
  REGION 1..15: note = Synthetic: amino acid sequence for exemplary linker
SEGSAGTSTESEGSA

SEQ ID NO: 314 - protein, 15 aa, synthetic construct
  REGION 1..15: note = Synthetic: amino acid sequence for exemplary linker
GGGGSGGGGSGGGGS

SEQ ID NO: 315 - protein, 15 aa, synthetic construct
  REGION 1..15: note = Synthetic: amino acid sequence for exemplary linker
GGGGSGGGGSEAAAK

SEQ ID NO: 316 - protein, 15 aa, synthetic construct
  REGION 1..15: note = Synthetic: amino acid sequence for exemplary linker
GGGGSEAAAKGGGGS

SEQ ID NO: 317 - protein, 15 aa, synthetic construct
  REGION 1..15: note = Synthetic: amino acid sequence for exemplary linker
EAAAKGGGGSEAAAK

SEQ ID NO: 318 - protein, 15 aa, synthetic construct
  REGION 1..15: note = Synthetic: amino acid sequence for exemplary linker
EAAAKEAAAKGGGGS

SEQ ID NO: 319 - protein, 20 aa, synthetic construct
  REGION 1..20: note = Synthetic: amino acid sequence for exemplary linker
SEGSAGTSTESEGSAGTSTE

SEQ ID NO: 320 - protein, 20 aa, synthetic construct
  REGION 1..20: note = Synthetic: amino acid sequence for exemplary linker
GGGGSGGGGSGGGGSEAAAK

SEQ ID NO: 321 - protein, 20 aa, synthetic construct
  REGION 1..20: note = Synthetic: amino acid sequence for exemplary linker
GGGGSGGGGSEAAAKGGGGS

SEQ ID NO: 322 - protein, 20 aa, synthetic construct
  REGION 1..20: note = Synthetic: amino acid sequence for exemplary linker
GGGGSEAAAKGGGGSEAAAK

SEQ ID NO: 323 - protein, 20 aa, synthetic construct
  REGION 1..20: note = Synthetic: amino acid sequence for exemplary linker
GGGGSEAAAKEAAAKGGGGS

SEQ ID NO: 324 - protein, 20 aa, synthetic construct
  REGION 1..20: note = Synthetic: amino acid sequence for exemplary linker
GGGGSEAAAKEAAAKEAAAK

SEQ ID NO: 325 - protein, 20 aa, synthetic construct
  REGION 1..20: note = Synthetic: amino acid sequence for exemplary linker
EAAAKGGGGSGGGGSGGGGS

SEQ ID NO: 326 - protein, 20 aa, synthetic construct
  REGION 1..20: note = Synthetic: amino acid sequence for exemplary linker
EAAAKGGGGSGGGGSEAAAK

SEQ ID NO: 327 - protein, 20 aa, synthetic construct
  REGION 1..20: note = Synthetic: amino acid sequence for exemplary linker
EAAAKGGGGSEAAAKGGGGS

SEQ ID NO: 328 - protein, 20 aa, synthetic construct
  REGION 1..20: note = Synthetic: amino acid sequence for exemplary linker
EAAAKGGGGSEAAAKEAAAK

SEQ ID NO: 329 - protein, 20 aa, synthetic construct
  REGION 1..20: note = Synthetic: amino acid sequence for exemplary linker
EAAAKEAAAKGGGGSGGGGS

SEQ ID NO: 330 - protein, 20 aa, synthetic construct
  REGION 1..20: note = Synthetic: amino acid sequence for exemplary linker
EAAAKEAAAKGGGGSEAAAK

SEQ ID NO: 331 - protein, 20 aa, synthetic construct
  REGION 1..20: note = Synthetic: amino acid sequence for exemplary linker
EAAAKEAAAKEAAAKGGGGS

SEQ ID NO: 332 - protein, 25 aa, synthetic construct
  REGION 1..25: note = Synthetic: amino acid sequence for exemplary linker
SEGSAGTSTESEGSAGTSTESEGSA

SEQ ID NO: 333 - protein, 25 aa, synthetic construct
  REGION 1..25: note = Synthetic: amino acid sequence for exemplary linker
GGGGSGGGGSGGGGSGGGGSGGGGS

SEQ ID NO: 334 - protein, 25 aa, synthetic construct
  REGION 1..25: note = Synthetic: amino acid sequence for exemplary linker
GGGGSGGGGSGGGGSGGGGSEAAAK

SEQ ID NO: 335 - protein, 25 aa, synthetic construct
  REGION 1..25: note = Synthetic: amino acid sequence for exemplary linker
GGGGSGGGGSGGGGSEAAAKGGGGS

SEQ ID NO: 336 - protein, 25 aa, synthetic construct
  REGION 1..25: note = Synthetic: amino acid sequence for exemplary linker
GGGGSGGGGSGGGGSEAAAKEAAAK

SEQ ID NO: 337 - protein, 25 aa, synthetic construct
  REGION 1..25: note = Synthetic: amino acid sequence for exemplary linker
GGGGSGGGGSEAAAKGGGGSGGGGS

SEQ ID NO: 338 - protein, 25 aa, synthetic construct
  REGION 1..25: note = Synthetic: amino acid sequence for exemplary linker
GGGGSGGGGSEAAAKGGGGSEAAAK

SEQ ID NO: 339 - protein, 25 aa, synthetic construct
  REGION 1..25: note = Synthetic: amino acid sequence for exemplary linker
GGGGSGGGGSEAAAKEAAAKGGGGS

SEQ ID NO: 340 - protein, 25 aa, synthetic construct
  REGION 1..25: note = Synthetic: amino acid sequence for exemplary linker
GGGGSGGGGSEAAAKEAAAKEAAAK

SEQ ID NO: 341 - protein, 25 aa, synthetic construct
  REGION 1..25: note = Synthetic: amino acid sequence for exemplary linker
GGGGSEAAAKGGGGSGGGGSGGGGS

SEQ ID NO: 342 - protein, 25 aa, synthetic construct
  REGION 1..25: note = Synthetic: amino acid sequence for exemplary linker
GGGGSEAAAKGGGGSGGGGSEAAAK

SEQ ID NO: 343 - protein, 25 aa, synthetic construct
  REGION 1..25: note = Synthetic: amino acid sequence for exemplary linker
GGGGSEAAAKGGGGSEAAAKGGGGS

SEQ ID NO: 344 - protein, 25 aa, synthetic construct
  REGION 1..25: note = Synthetic: amino acid sequence for exemplary linker
GGGGSEAAAKGGGGSEAAAKEAAAK

SEQ ID NO: 345 - protein, 25 aa, synthetic construct
  REGION 1..25: note = Synthetic: amino acid sequence for exemplary linker
GGGGSEAAAKEAAAKGGGGSGGGGS

SEQ ID NO: 346 - protein, 25 aa, synthetic construct
  REGION 1..25: note = Synthetic: amino acid sequence for exemplary linker
GGGGSEAAAKEAAAKEAAAKGGGGS

SEQ ID NO: 347 - protein, 25 aa, synthetic construct
  REGION 1..25: note = Synthetic: amino acid sequence for exemplary linker
GGGGSEAAAKEAAAKEAAAKEAAAK

SEQ ID NO: 348 - protein, 25 aa, synthetic construct
  REGION 1..25: note = Synthetic: amino acid sequence for exemplary linker
EAAAKGGGGSGGGGSGGGGSGGGGS

SEQ ID NO: 349 - protein, 25 aa, synthetic construct
  REGION 1..25: note = Synthetic: amino acid sequence for exemplary linker
EAAAKGGGGSGGGGSGGGGSEAAAK

SEQ ID NO: 350 - protein, 25 aa, synthetic construct
  REGION 1..25: note = Synthetic: amino acid sequence for exemplary linker
EAAAKGGGGSGGGGSEAAAKGGGGS

SEQ ID NO: 351 - protein, 25 aa, synthetic construct
  REGION 1..25: note = Synthetic: amino acid sequence for exemplary linker
EAAAKGGGGSGGGGSEAAAKEAAAK

SEQ ID NO: 352 - protein, 25 aa, synthetic construct
  REGION 1..25: note = Synthetic: amino acid sequence for exemplary linker
EAAAKGGGGSEAAAKGGGGSGGGGS

SEQ ID NO: 353 - protein, 25 aa, synthetic construct
  REGION 1..25: note = Synthetic: amino acid sequence for exemplary linker
EAAAKGGGGSEAAAKGGGGSEAAAK

SEQ ID NO: 354 - protein, 25 aa, synthetic construct
  REGION 1..25: note = Synthetic: amino acid sequence for exemplary linker
EAAAKGGGGSEAAAKEAAAKGGGGS

SEQ ID NO: 355 - protein, 25 aa, synthetic construct
  REGION 1..25: note = Synthetic: amino acid sequence for exemplary linker
EAAAKGGGGSEAAAKEAAAKEAAAK

SEQ ID NO: 356 - protein, 25 aa, synthetic construct
  REGION 1..25: note = Synthetic: amino acid sequence for exemplary linker
EAAAKEAAAKGGGGSEAAAKGGGGS

SEQ ID NO: 357 - protein, 25 aa, synthetic construct
  REGION 1..25: note = Synthetic: amino acid sequence for exemplary linker
EAAAKEAAAKGGGGSEAAAKEAAAK

SEQ ID NO: 358 - protein, 25 aa, synthetic construct
  REGION 1..25: note = Synthetic: amino acid sequence for exemplary linker
EAAAKEAAAKEAAAKGGGGSEAAAK

SEQ ID NO: 359 - protein, 25 aa, synthetic construct
  REGION 1..25: note = Synthetic: amino acid sequence for exemplary linker
EAAAKEAAAKEAAAKEAAAKGGGGS

SEQ ID NO: 360 - protein, 25 aa, synthetic construct
  REGION 1..25: note = Synthetic: amino acid sequence for exemplary linker
EAAAKEAAAKEAAAKEAAAKEAAAK

SEQ ID NO: 361 - protein, 16 aa, synthetic construct
  REGION 1..16: note = Synthetic: amino acid sequence for exemplary linker
GTKDSTKDIPETPSKD

SEQ ID NO: 362 - protein, 16 aa, synthetic construct
  REGION 1..16: note = Synthetic: amino acid sequence for exemplary linker
GRDVRQPEVKEEKPES

SEQ ID NO: 363 - protein, 16 aa, synthetic construct
  REGION 1..16: note = Synthetic: amino acid sequence for exemplary linker
EGKSSGSGSESKSTAG

SEQ ID NO: 364 - protein, 16 aa, synthetic construct
  REGION 1..16: note = Synthetic: amino acid sequence for exemplary linker
TPGSPAGSPTSTEEGT

SEQ ID NO: 365 - protein, 16 aa, synthetic construct
  REGION 1..16: note = Synthetic: amino acid sequence for exemplary linker
GSEPATSGSETPGTST

SEQ ID NO: 366 - protein, 8 aa, synthetic construct
  REGION 1..8: note = Synthetic: SV40 NLS
PKKKRKVE

SEQ ID NO: 367 - protein, 7 aa, synthetic construct
  REGION 1..7: note = Synthetic: SV40 NLS
KKKRKVE

SEQ ID NO: 368 - protein, 19 aa, synthetic construct
  REGION 1..19: note = Synthetic: bipartite NLS
KRTADGSEFESPKKKRKVE

SEQ ID NO: 369 - protein, 9 aa, synthetic construct
  REGION 1..9: note = Synthetic: c-myc like NLS
PAAKKKKLD

SEQ ID NO: 370 - DNA, 21 bp, synthetic construct
  source 1..21: mol_type = other DNA
  misc_feature 1..21: note = Synthetic: Nucleic acid sequence for SV40 NLS
cccaagaagaagaggaaagtc

SEQ ID NO: 371 - protein, 7 aa, synthetic construct
  REGION 1..7: note = Synthetic: Amino acid sequence for SV40 NLS
PKKKRKV

SEQ ID NO: 372 - protein, 9 aa, synthetic construct
  REGION 1..9: note = Synthetic: Exemplary NLS 1
LAAKRSRTT

SEQ ID NO: 373 - protein, 9 aa, synthetic construct
  REGION 1..9: note = Synthetic: Exemplary NLS 2
QAAKRSRTT

SEQ ID NO: 374 - protein, 10 aa, synthetic construct
  REGION 1..10: note = Synthetic: Exemplary NLS 3
PAPAKRERTT

SEQ ID NO: 375 - protein, 9 aa, synthetic construct
  REGION 1..9: note = Synthetic: Exemplary NLS 4
QAAKRPRTT

SEQ ID NO: 376 - protein, 9 aa, synthetic construct
  REGION 1..9: note = Synthetic: Exemplary NLS 5
RAAKRPRTT

SEQ ID NO: 377 - protein, 11 aa, synthetic construct
  REGION 1..11: note = Synthetic: Exemplary NLS 6
AAAKRSWSMAA

SEQ ID NO: 378 - protein, 11 aa, synthetic construct
  REGION 1..11: note = Synthetic: Exemplary NLS 7
AAAKRVWSMAF

SEQ ID NO: 379 - protein, 11 aa, synthetic construct
  REGION 1..11: note = Synthetic: Exemplary NLS 8
AAAKRSWSMAF

SEQ ID NO: 380 - protein, 10 aa, synthetic construct
  REGION 1..10: note = Synthetic: Exemplary NLS 9
AAAKRKYFAA

SEQ ID NO: 381 - protein, 10 aa, synthetic construct
  REGION 1..10: note = Synthetic: Exemplary NLS 10
RAAKRKAFAA

SEQ ID NO: 382 - protein, 10 aa, synthetic construct
  REGION 1..10: note = Synthetic: Exemplary NLS 11
RAAKRKYFAV

SEQ ID NO: 383 - protein, 7 aa, synthetic construct
  REGION 1..7: note = Synthetic: Alternative SV40 NLS
PKKKRRV

SEQ ID NO: 384 - protein, 16 aa, synthetic construct
  REGION 1..16: note = Synthetic: Nucleoplasmin NLS
KRPAATKKAGQAKKKK

SEQ ID NO: 385 - DNA, 21 bp, synthetic construct
  misc_feature 1..21: note = Synthetic: Exemplary coding sequence for SV40 NLS
  source 1..21: mol_type = other DNA
ccgaagaagaagagaaaggtc

SEQ ID NO: 386 - DNA, 27 bp, synthetic construct
  misc_feature 1..27: note = Synthetic: Exemplary coding sequence for NLS1
  source 1..27: mol_type = other DNA
ctggcagcaaagagaagcagaacaaca

SEQ ID NO: 387 - DNA, 27 bp, synthetic construct
  misc_feature 1..27: note = Synthetic: Exemplary coding sequence for NLS2
  source 1..27: mol_type = other DNA
caggcagcaaagagaagcagaacaaca

SEQ ID NO: 388 - DNA, 30 bp, synthetic construct
  misc_feature 1..30: note = Synthetic: Exemplary coding sequence for NLS3
  source 1..30: mol_type = other DNA
ccggcaccggcaaagagagaaagaacaaca

SEQ ID NO: 389 - DNA, 27 bp, synthetic construct
  misc_feature 1..27: note = Synthetic: Exemplary coding sequence for NLS4
  source 1..27: mol_type = other DNA
caggcagcaaagagaccgagaacaaca

SEQ ID NO: 390 - DNA, 27 bp, synthetic construct
  misc_feature 1..27: note = Synthetic: Exemplary coding sequence for NLS5
  source 1..27: mol_type = other DNA
agagcagcaaagagaccgagaacaaca

SEQ ID NO: 391 - DNA, 33 bp, synthetic construct
  misc_feature 1..33: note = Synthetic: Exemplary coding sequence for NLS6
  source 1..33: mol_type = other DNA
gcagcagcaaagagaagctggagcatggcagca

SEQ ID NO: 392 - DNA, 33 bp, synthetic construct
  misc_feature 1..33: note = Synthetic: Exemplary coding sequence for NLS7
  source 1..33: mol_type = other DNA
gcagcagcaaagagagtctggagcatggcattc

SEQ ID NO: 393 - DNA, 33 bp, synthetic construct
  misc_feature 1..33: note = Synthetic: Exemplary coding sequence for NLS8
  source 1..33: mol_type = other DNA
gcagcagcaaagagaagctggagcatggcattc

SEQ ID NO: 394 - DNA, 30 bp, synthetic construct
  misc_feature 1..30: note = Synthetic: Exemplary coding sequence for NLS9
  source 1..30: mol_type = other DNA
gcagcagcaaagagaaagtacttcgcagca

SEQ ID NO: 395 - DNA, 30 bp, synthetic construct
  misc_feature 1..30: note = Synthetic: Exemplary coding sequence for NLS10
  source 1..30: mol_type = other DNA
agagcagcaaagagaaaggcattcgcagca

SEQ ID NO: 396 - DNA, 30 bp, synthetic construct
  misc_feature 1..30: note = Synthetic: Exemplary coding sequence for NLS11
  source 1..30: mol_type = other DNA
agagcagcaaagagaaagtacttcgcagtc

SEQ ID NO: 397 - DNA, 21 bp, synthetic construct
  misc_feature 1..21: note = Synthetic: Exemplary coding sequence for alternate SV40 NLS
  source 1..21: mol_type = other DNA
ccgaagaagaagagaagagtc

SEQ ID NO: 398 - DNA, 50 bp, synthetic construct
  misc_feature 1..50: note = Synthetic: Exemplary 5' UTR
  source 1..50: mol_type = other DNA
acatttgcttctgacacaactgtgttcactagcaacctcaaacagacacc

SEQ ID NO: 399 - DNA, 66 bp, synthetic construct
  misc_feature 1..66: note = Synthetic: Exemplary 5' UTR
  source 1..66: mol_type = other DNA
cataaaccctggcgcgctcgcggcccggcactcttctggtccccacagactcagagagaacccacc

SEQ ID NO: 400 - DNA, 29 bp, synthetic construct
  misc_feature 1..29: note = Synthetic: Exemplary 5' UTR
  source 1..29: mol_type = other DNA
aagctcagaataaacgctcaactttggcc

SEQ ID NO: 401 - DNA, 27 bp, synthetic construct
  misc_feature 1..27: note = Synthetic: Exemplary 5' UTR
  source 1..27: mol_type = other DNA
cagggtcctgtggacagctcaccagct

SEQ ID NO: 402 - DNA, 61 bp, synthetic construct
  misc_feature 1..61: note = Synthetic: Exemplary 5' UTR
  source 1..61: mol_type = other DNA
tcccgcagtcggcgtccagcggctctgcttgttcgtgtgtgtgtcgttgcaggccttattc

SEQ ID NO: 403 - DNA, 42 bp, synthetic construct
  misc_feature 1..42: note = Synthetic: Exemplary 5' UTR
  source 1..42: mol_type = other DNA
cagatcgcctggagacgccatccacgctgttttgacctccat

SEQ ID NO: 404 - DNA, 42 bp, synthetic construct
  misc_feature 1..42: note = Synthetic: Exemplary 5' UTR
  source 1..42: mol_type = other DNA
agaagacaccgggaccgatccagcctccgcggccgggaacgg

SEQ ID NO: 405 - DNA, 42 bp, synthetic construct
  misc_feature 1..42: note = Synthetic: Exemplary 5' UTR
  source 1..42: mol_type = other DNA
tgcattggaacgcggattccccgtgccaagagtgactcaccg

SEQ ID NO: 406 - DNA, 132 bp, synthetic construct
  misc_feature 1..132: note = Synthetic: Exemplary 3' UTR
  source 1..132: mol_type = other DNA
gctcgctttcttgctgtccaatttctattaaaggttcctttgttccctaagtccaactactaaactgggggatattatgaagggccttgagcatctggattctgcctaataaaaaacatttattttcattgc

SEQ ID NO: 407 - DNA, 110 bp, synthetic construct
  misc_feature 1..110: note = Synthetic: Exemplary 3' UTR
  source 1..110: mol_type = other DNA
gctggagcctcggtggccatgcttcttgccccttgggcctccccccagcccctcctccccttcctgcacccgtacccccgtggtctttgaataaagtctgagtgggcggc

SEQ ID NO: 408 - DNA, 130 bp, synthetic construct
  misc_feature 1..130: note = Synthetic: Exemplary 3' UTR
  source 1..130: mol_type = other DNA
accagcctcaagaacacccgaatggagtctctaagctacataataccaacttacactttacaaaatgttgtcccccaaaatgtagccattcgtatctgctcctaataaaaagaaagtttcttcacattct

SEQ ID NO: 409 - DNA, 102 bp, synthetic construct
  misc_feature 1..102: note = Synthetic: Exemplary 3' UTR
  source 1..102: mol_type = other DNA
ttgccagccatctgttgtttgcccctcccccgtgccttccttgaccctggaaggtgccactcccactgtcctttcctaataaaatgaggaaattgcatcgca

SEQ ID NO: 410 - DNA, 93 bp, synthetic construct
  misc_feature 1..93: note = Synthetic: Exemplary 3' UTR
  source 1..93: mol_type = other DNA
gctgccttctgcggggcttgccttctggccatgcccttcttctctcccttgcacctgtacctcttggtctttgaataaagcctgagtaggaag

SEQ ID NO: 411 - DNA, 278 bp, synthetic construct
  misc_feature 1..278: note = Synthetic: Exemplary 3' UTR
  source 1..278: mol_type = other DNA
ctggtactgcatgcacgcaatgctagctgcccctttcccgtcctgggtaccccgagtctcccccgacctcgggtcccaggtatgctcccacctccacctgccccactcaccacctctgctagttccagacacctcccaagcacgcagcaatgcagctcaaaacgcttagcctagccacacccccacgggaaacagcagtgattaacctttagcaataaacgaaagtttaactaagctatactaaccccagggttggtcaatttcgtgccagccacacc

SEQ ID NO: 412 - DNA, 278 bp, synthetic construct
  misc_feature 1..278: note = Synthetic: Exemplary 3' UTR
  source 1..278: mol_type = other DNA
caagcacgcagcaatgcagctcaaaacgcttagcctagccacacccccacgggaaacagcagtgattaacctttagcaataaacgaaagtttaactaagctatactaaccccagggttggtcaatttcgtgccagccacaccctggtactgcatgcacgcaatgctagctgcccctttcccgtcctgggtaccccgagtctcccccgacctcgggtcccaggtatgctcccacctccacctgccccactcaccacctctgctagttccagacacctcc

SEQ ID NO: 413 - DNA, 260 bp, synthetic construct
  misc_feature 1..260: note = Synthetic: Exemplary 3' UTR
  source 1..260: mol_type = other DNA
accagcctcaagaacacccgaatggagtctctaagctacataataccaacttacactttacaaaatgttgtcccccaaaatgtagccattcgtatctgctcctaataaaaagaaagtttcttcacattctaccagcctcaagaacacccgaatggagtctctaagctacataataccaacttacactttacaaaatgttgtcccccaaaatgtagccattcgtatctgctcctaataaaaagaaagtttcttcacattct

SEQ ID NO: 414 - RNA, 10 nt, synthetic construct
  misc_feature 1..10: note = Synthetic: Exemplary Kozak sequence
  source 1..10: mol_type = other RNA
gccrccatgg

SEQ ID NO: 415 - RNA, 13 nt, synthetic construct
  misc_feature 1..13: note = Synthetic: Exemplary Kozak sequence
  source 1..13: mol_type = other RNA
gccgccrccatgg

SEQ ID NO: 416 - DNA, 105 bp, synthetic construct
  misc_feature 1..105: note = Synthetic: Exemplary poly-A sequence
  source 1..105: mol_type = other DNA
aaaaaaaaaaaaaaaaaaaaaaaaaaaaaagcgaaaaaaaaaaaaaaaaaaaaaaaaaaaaaaccgaaaaaaaaaaaaaaaaaaaaaaaaaaaaaaaaaaaaaaa

SEQ ID NO: 417-424 - skipped (8 entries)

We claim:

1. A method of producing a modification in the genome of a target cell, the method comprising contacting the cell with:
(a) a fusion protein, or a nucleic acid encoding a fusion protein, wherein the fusion protein comprises a first cleavase and a second cleavase, wherein:
a. the first cleavase is a Streptococcus pyogenes (Spy)Cas9 cleavase, said SpyCas9 cleavase comprising a R1333K mutation within its protospacer adjacent motif recognition domain; and
b. the second cleavase is a Neisseria meningitidis (Nme)Cas9 cleavase, a Campylobacter jejuni (Cje) Cas9 cleavase, or a Simonsiella muelleri (Smu) Cas9 cleavase; and
(b) a first guide RNA that directs the first cleavase to a first genomic locus; and
(c) a second guide RNA that directs the second cleavase to a second genomic locus,
wherein the second genomic locus is different from the first genomic locus.

2. A method of producing a cell or a population of cells comprising a modification in the genome of the target cell or cells, the method comprising contacting the cell or cells with:
(a) a fusion protein, or a nucleic acid encoding a fusion protein, wherein the fusion protein comprises a first cleavase and a second cleavase, wherein:
a. the first cleavase is a S. pyogenes (Spy)Cas9 cleavase, said SpyCas9 cleavase comprising a R1333K mutation within its protospacer adjacent motif recognition domain; and
b. the second cleavase is a N. meningitidis (Nme)Cas9 cleavase, a C. jejuni (Cje)Cas9 cleavase, or a S. muelleri (Smu)Cas9 cleavase; and
(b) a first guide RNA that directs the first cleavase to a first genomic locus; and
(c) a second guide RNA that directs the second cleavase to a second genomic locus,
wherein the second genomic locus is different from the first genomic locus.

3. The method of any one of claim 1 or 2, wherein the first cleavase is located N-terminal to the second cleavase.

4. The method of any one of claim 1 or 2, wherein the first cleavase is located C-terminal to the second cleavase.

5. The method of any one of claims 1-4, wherein the first guide RNA and the second guide RNA target two non-overlapping genomic loci, optionally wherein the two non-overlapping genomic loci are separated by equal to or less than 150, 140, 130, 120, 110, 100, 90, 80, 70, 60, 50, 40, 30, or 25 nucleotides.

6. The method of claim 5, wherein the two non-overlapping genomic loci are separated by equal to or less than 110 nucleotides.

7. The method of any one of the preceding claims, wherein the first guide RNA is a single guide RNA (sgRNA), optionally a SpyCas9 guide RNA.

8. The method of claim 7, wherein the SpyCas9 guide RNA is a single guide RNA comprising:
a conserved portion of an sgRNA comprising an upper stem and hairpin region, wherein every nucleotide in the upper stem region is modified with 2′-O-Me, and every nucleotide in the hairpin region is modified with 2′-O-Me;
a 3′ end modification comprising 2′-O-Me modified nucleotides at the last three nucleotides of the 3′ end and phosphorothioate (PS) bonds between the last four nucleotides of the 3′ end; and
5′ end modification comprising 2′-O-Me modified nucleotides at the first three nucleotides of the 5′ end; and phosphorothioate (PS) bonds between the first four nucleotides of the 5′ end.

9. The method of claim 7 or 8, wherein the SpyCas9 guide RNA is a short-single guide RNA (short-sgRNA) comprising a conserved portion of an sgRNA comprising a hairpin region, wherein the hairpin region lacks at least 5-10 nucleotides and wherein the short-sgRNA comprises (i) a 5′ end modification or (ii) a 3′ end modification, optionally comprising a nucleotide sequence selected from SEQ ID NOs: 159-167, 170-177, and 180-194, or a nucleotide sequence that is at least 85%, 90%, or 95% identical to SEQ ID NOs: 159-167, 170-177, and 180-194.

10. The method of any one of claims 1-9, wherein the second guide RNA is a single guide RNA (sgRNA), optionally a NmeCas9 guide RNA.

11. The method of claim 10, wherein the second guide RNA is a shortened or chemically modified single guide RNA (sgRNA).

12. The method of any one of claims 1-11, wherein the second guide RNA is a NmeCas9 guide RNA that is a single guide RNA comprising a nucleotide sequence selected from SEQ ID NOs: 280-297, or a nucleotide sequence that is at least 85%, 90%, or 95% identical to SEQ ID NOs: 280-297.

13. The method of claim 12, wherein the second guide RNA comprises one or more internal polyethylene glycol (PEG) linker, optionally wherein the second guide RNA comprises at least 85%, 90%, 95%, 99%, 100% identical to a sequence selected from SEQ ID NOs: 272-278.

14. The method of any one of claims 1-13, wherein one or both of the guide RNAs comprises one or more mismatches to the target sequences.

15. The method of any one of claims 1-14, wherein the nucleic acid encoding the fusion protein is delivered to the cell on at least one vector.

16. The method of any one of claims 1-15, wherein one or more of the fusion protein or the nucleic acid encoding the fusion protein, the first guide RNA, and the second guide RNA are delivered to the cell via electroporation.

17. The method of any one of claims 1-16, wherein the modification is in vivo.

18. The method of any one of claims 1-17, wherein the modification is ex vivo.

19. The method of any one of claims 1-18, wherein the modification comprises a deletion of equal to or less than 150, 140, 130, 120, 110, 100, 90, 80, 70, 60, 50, 40, 30, or 25 nucleotides, optionally wherein the modification comprises a deletion of equal to or less than 150, 140, 130, 120, 110, 100, 90, 80, 70, 60, 50, 40, 30, or 25 contiguous nucleotides.

20. The method of any one of claims 1-19, wherein the modification comprises a deletion of equal to or larger than 25, 35, 45, 55, 65, 75, 85, 95, 100, 105 nucleotides, optionally wherein the modification comprises a deletion of equal to or larger than 25, 35, 45, 55, 65, 75, 85, 95, 100, 105 contiguous nucleotides.

21. The method of any one of claims 1-20, wherein the modification comprises a deletion of each of the nucleotides between a first cleavage site and a second cleavage site.

22. The method of any one of claims 19-21, wherein the deletion comprises one or both protospacer adjacent motif (PAM) sites recognized by the first cleavase or the second cleavase.

23. The method of any one of claims 1-22, wherein the modification increases the expression of one or more RNAs or proteins, optionally wherein the modification increases the expression of the one or more RNAs or proteins by at least two-fold.

24. The method of any one of claims 1-23, wherein the modification results in the deletion of a start codon.

25. The method of any one of claims 1-24, wherein the modification reduces or eliminates the expression of one or more mRNAs or proteins, optionally wherein the modification reduces or eliminates the expression of one or more mRNAs or proteins by at least 50%, at least 55%, at least 60%, at least 65%, at least 70%, at least 75%, at least 80%, at least 85%, at least 90%, or at least 95%.

26. The method of any one of claims 1-25, wherein the cell is in a subject.

27. The method of any one of claims 1-26, wherein the cell comprises
a. a kidney cell;
b. a liver cell;
c. a cell selected from a mesenchymal stem cell, a hematopoietic stem cell (HSC), a mononuclear cell, an endothelial progenitor cells (EPC), a neural stem cells (NSC), a limbal stem cell (LSC), a tissue-specific primary cell or a cell derived therefrom (TSC), an induced pluripotent stem cell (iPSC), an ocular stem cell, a pluripotent stem cell (PSC), an embryonic stem cell (ESC), and a cell for organ or tissue transplantation;
d. an immune cell,
e. a T-cell; or
f. a lymphocyte.

28. An engineered cell or population of engineered cells altered by the method of any one of claims 1-27.

29. The engineered cell or population of engineered cells of claim 28, wherein the genetic modification comprises a deletion of equal to or less than 110, 100, 90, 80, 70, 60, 50, 40, 30, or 25 nucleotides, optionally wherein the deletion comprises one or both protospacer adjacent motif (PAM) sites.

30. A polynucleotide comprising an open reading frame (ORF) encoding a fusion protein, wherein the fusion protein comprises a first cleavase and a second cleavase, wherein:
a. the first cleavase is a S. pyogenes (Spy)Cas9 cleavase, said SpyCas9 cleavase comprising a R1333K mutation within its protospacer adjacent motif recognition domain; and
b. the second cleavase is a N. meningitidis (Nme)Cas9 cleavase, a C. jejuni (Cje) Cas9 cleavase, or a S. muelleri (Smu) Cas9 cleavase.

31. A composition comprising
(a) a polynucleotide comprising an open reading frame (ORF) encoding a fusion protein, wherein the fusion protein comprises a first cleavase and a second cleavase, wherein:
a. the first cleavase is a S. pyogenes (Spy)Cas9 cleavase, said SpyCas9 cleavase comprising a R1333K mutation within its protospacer adjacent motif recognition domain; and
b. the second cleavase is a N. meningitidis (Nme)Cas9 cleavase, a C. jejuni (Cje) Cas9 cleavase, or a Simonsiella muelleri (Smu) Cas9 cleavase; and
(b) a first guide RNA that directs the first cleavase to a first genomic locus; and
(c) a second guide RNA that directs the second cleavase to a second genomic locus,
wherein the second genomic locus is different from the first genomic locus.

32. One or more lipid nanoparticles comprising:
(a) a polynucleotide comprising an open reading frame (ORF) encoding a fusion protein, wherein the fusion protein comprises a first cleavase and a second cleavase, wherein:
a. the first cleavase is a S. pyogenes (Spy)Cas9 cleavase, said SpyCas9 cleavase comprising a R1333K mutation within its protospacer adjacent motif recognition domain; and
b. the second cleavase is a N. meningitidis (Nme)Cas9 cleavase, a C. jejuni (Cje) Cas9 cleavase, or a Simonsiella muelleri (Smu) Cas9 cleavase; and
(b) a first guide RNA that directs the first cleavase to a first genomic locus; and
(c) a second guide RNA that directs the second cleavase to a second genomic locus,
wherein the second genomic locus is different from the first genomic locus.

33. The method, polynucleotide, composition or lipid nanoparticles of any one of claims 1-32, wherein (i) the SpyCas9 cleavase comprises an amino acid sequence of SEQ ID NO: 105 or an amino acid sequence that is at least 85%, at least 90%, or at least 95% identical to SEQ ID NO: 105; or (ii) the nucleotide encoding the SpyCas9 cleavase comprises an open reading frame (ORF) comprising a sequence of SEQ ID NO: 104 or a nucleotide sequence that is at least 85, at least 90%, or at least 95% identical to SEQ ID NO: 104.

34. The method, polynucleotide, composition or lipid nanoparticles of any one of claims 1-33, wherein the second cleavase is a NmeCas9 cleavase.

35. The method, polynucleotide, composition or lipid nanoparticles of any one of claims 1-34, wherein the NmeCas9 cleavase is an Nme1Cas9, an Nme2Cas9, or an Nme3Cas9.

36. The method, polynucleotide, composition or lipid nanoparticles of any one of claims 1-35, wherein (i) the NmeCas9 cleavase comprises an amino acid sequence of any one of SEQ ID NO: 22, 107, 109, 120, 127, 136, or 137 or an amino acid sequence that is at least 85%, at least 90%, at least 95% identical to any one of SEQ ID NO: 22, 107, 109, 120, 127, 136, or 137; or (ii) the nucleotide encoding the NmeCas9 cleavase comprises a nucleotide sequence of any one of SEQ ID NO: 21, 106, 108, 121-126, 128-133, 134, 135, 138, or 139; or a nucleotide sequence that is at least 85%, at least 90%, or at least 95% identical to any one of SEQ ID NO: SEQ ID NO: 21, 106, 108, 121-126, 128-133, 134, 135, 138, or 139.

37. The method, polynucleotide, composition or lipid nanoparticles of any one of claims 1-36, wherein (a) the NmeCas9 cleavase is a Nme2Cas9 comprises an amino acid sequence of any one of SEQ ID NO: 22, 109, or 136, or an amino acid sequence that is at least 85%, at least 90%, at least 95% identical to any one of SEQ ID NO: 22, 109, or 136; or (b) the nucleotide encoding the NmeCas9 cleavase comprises a nucleotide sequence of any one of SEQ ID NO: 21, 108, or 138; or a nucleotide sequence that is at least 85%, at least 90%, or at least 95% identical to any one of SEQ ID NO: SEQ ID NO: 21, 108, or 138.

38. The method, polynucleotide, composition or lipid nanoparticles of any one of claims 1-37, wherein (a) the CjeCas9 cleavase comprises an amino acid sequence of SEQ ID NO: 144; or an amino acid sequence that is at least 85%, at least 90%, or at least 95% identical to SEQ ID NO: 144; or (b) the nucleotide encoding the CjeCas9 cleavase comprises a sequence of SEQ ID NO: 143 or a nucleotide sequence that is at least 85%, at least 90%, or at least 95% identical to SEQ ID NO: 143.

39. The method polynucleotide, composition or lipid nanoparticles of any one of claims 1-38, wherein (a) the SmuCas9 cleavase comprises an amino acid sequence of SEQ ID NO: 142; or an amino acid sequence that is at least 85%, at least 90%, or at least 95% identical to SEQ ID NO: 142; or (b) the nucleotide encoding the SmuCas9 cleavase comprises an open reading frame (ORF) comprising a sequence of SEQ ID NO: 140 or 141 or a nucleotide sequence that is at least 85%, at least 90%, or at least 95% identical to SEQ ID NO: 140 or 141.

40. The method, polynucleotide, composition or lipid nanoparticles of any one of claims 1-39, wherein the fusion protein comprises a peptide linker between the first cleavase and the second cleavase, optionally wherein the peptide linker comprises
a. at least 10, at least 20, at least 30, at least 40, at least 50, at least 60, at least 70, at least 80 amino acid residues; or
b. 11, 21, 31, 41, 51, 61, 71, or 81 amino acid residues.

41. The method, polynucleotide, composition or lipid nanoparticles of any one of claims 1-40, wherein the fusion protein comprises a peptide linker between the first cleavase and the second cleavase and the peptide linker comprises an amino acid sequence of any one of SEQ ID NOs: 150-158; or an amino acid sequence is at least 85%, at least 90%, or at least 95% identical to any one of SEQ ID NOs: 150-158.

42. The method, polynucleotide, composition or lipid nanoparticles of any one of claims 1-41, wherein the fusion protein comprises a nuclear localization signal (NLS), optionally wherein
a. the NLS is present at the C-terminus of the fusion protein;
b. the NLS is present at the N-terminus of the fusion protein; or
c. the NLS is present at both the N-terminus and C-terminus of the fusion protein.

43. The method, polynucleotide, composition or lipid nanoparticles of any one of any one of claims 1-42, wherein the fusion protein comprises a nuclear localization signal (NLS), and wherein the NLS comprises a sequence having at least 80%, at least 85%, at least 90%, or at least 95% identity to any one of SEQ ID NOs: 366-369 and 371-384 or is encoded by a sequence having at least 80%, at least 85%, at least 90%, at least 95%, at least 98% or 100% identity to the sequence of any one of SEQ ID NOs: 370 and 385-397.

44. The method, polynucleotide, composition or lipid nanoparticles of any one of claims 1-43, wherein the fusion protein comprise one, two, or three nuclear localization signals (NLSs) independently selected from SEQ ID NOs: 366-369 and 371-384.

45. The method, polynucleotide, composition or lipid nanoparticles of any one of claims 1-44, wherein
a. the fusion protein comprises, from N-terminus to C-terminus:
i. the first cleavase;
ii. a peptide linker, optionally wherein the linker comprises 81 amino acid residues;
iii. the second cleavase; and
iv. an NLS comprising an SV40 NLS;
b. the fusion protein comprises, from N-terminus to C-terminus:
i. a first NLS, wherein the first NLS comprises an SV40 NLS;
ii. the second cleavase;
iii. a peptide linker, optionally wherein the peptide linker comprises 41 amino acids;
iv. the first cleavase;
v. a second NLS, wherein the second NLS comprising an SV40 NLS; or
c. the fusion protein comprises, from N-terminus to C-terminus:
i. the second cleavase;
ii. a peptide linker, optionally wherein the peptide linker comprises 41 amino acids;
iii. the first cleavase; and
iv. an NLS, optionally wherein the NLS comprises an SV40 NLS.

46. The method, polynucleotide, composition or lipid nanoparticles of any one of claims 1-45, wherein
(a) the fusion protein comprise an amino acid sequence of SEQ ID NOs: 3, 5, 7, 10, 13, 16, 40, 43, 45, 47, 50, 52, 55, 57, 60, 62, 65, 67, 70, 72, 75, 77, 80, 82, 85, 87, 90, 92, 101, or 105, or an amino acid sequence that is at least 90%, or at least 95% identical to SEQ ID NO: 3, or an amino acid sequence that is at least 85%, at least 90%, or at least 95%% identical to an amino acid sequence of SEQ ID NOs: 5, 7, 10, 13, 16, 40, 43, 45, 47, 50, 52, 55, 57, 60, 62, 65, 67, 70, 72, 75, 77, 80, 82, 85, 87, 90, 92, 101, or 105; or
(b) the nucleic acid encoding the fusion protein comprises a nucleotide sequence of SEQ ID NOs: 1-2, 4, 6-8, 9, 11, 12, 14-15, 38-39, 41-42, 44, 46, 48-49, 51, 53, 54, 56, 58, 59, 61, 63, 64, 66, 68, 69, 71, 73, 74, 76, 78, 79, 81, 83, 84, 86, 88, 89, 91, 100, or 104, or a nucleotide sequence that is at least 90%, or at least 95% identical to SEQ ID NO: 1 or 2, or a nucleotide sequence that is at least 85%, at least 90%, or at least 95% identical to SEQ ID NO: 4, 6, 8, 9, 11, 12, 14-15, 38-39, 41-42, 44, 46, 48-49, 51, 53, 54, 56, 58, 59, 61, 63, 64, 66, 68, 69, 71, 73, 74, 76, 78, 79, 81, 83, 84, 86, 88, 89, 91, 100, or 104.

47. The method, polynucleotide, composition or lipid nanoparticles of any one of claims 1-46, wherein
(a) the fusion protein comprise an amino acid sequence of SEQ ID NOs: 3, 5, 7, 10, or 13, or an amino acid sequence that is at least 90%, or at least 95% identical to SEQ ID NO: 3, or an amino acid sequence that is at least 85%, at least 90%, or at least 95%% identical to an amino acid sequence of SEQ ID NOs: 5, 7, 10, or 13; or
(b) the nucleic acid encoding the fusion protein comprises a nucleotide sequence of SEQ ID NOs: 1, 2, 4, 6, 8, 9, 11 or 12, or a nucleotide sequence that is at least 90%, or at least 95% identical to SEQ ID NO: 1 or 2, or a nucleotide sequence that is at least 85%, at least 90%, or at least 95% identical to SEQ ID NO: 4, 6, 8, 9, 11 or 12.

48. The method, polynucleotide, composition, or lipid nanoparticles of any one of claims 1-47, wherein
(a) the fusion protein comprise an amino acid sequence of SEQ ID NOs: 5, 7, 10, 13, or 99, or an amino acid sequence that is at least 85%, at least 90%, or at least 95%% identical to an amino acid sequence of SEQ ID NOs: 5, 7, 10, 13, or 99; or
(b) the nucleic acid encoding the fusion protein comprises a nucleotide sequence of SEQ ID NOs: 4, 6, 8, 9, 11 or 12, a nucleotide sequence that is at least 85%, at least 90%, or at least 95% identical to SEQ ID NO: 4, 6, 8, 9, 11 or 12,

49. The method, polynucleotide, composition, or lipid nanoparticles of claim 48, wherein
a. the first polypeptide comprise an amino acid sequence of SEQ ID NOs: 28 or 31 or an amino acid sequence that is at least 85%, at least 90%, or at least 95% identical to SEQ ID NO: 28 or 31; or the nucleic acid or nucleic acids encoding the polypeptide or polypeptides comprises a sequence of SEQ ID NOs: 27 or 30, or a nucleotide sequence that is at least 85%, at least 90%, or at least 95% identical to SEQ ID NOs: 27 or 30; or
b. the second polypeptide comprise an amino acid sequence of SEQ ID NOs: 25 or 34 or an amino acid sequence that is at least 85%, at least 90%, or at least 95% identical to SEQ ID NO: 25 or 34; or the nucleic acid or nucleic acids encoding the polypeptide or polypeptides comprises a sequence of SEQ ID NOs: 24 or 33, or a nucleotide sequence that is at least 85%, at least 90%, or at least 95% identical to SEQ ID NOs: 24 or 33.

50. The polynucleotide, composition or lipid nanoparticles of any one of claims 30-49, wherein the polynucleotide comprises
a. a 5′ UTR with at least 85%, at least 90%, or at least 95% identity to any one of SEQ ID NOs: 398-405;
b. a 3′ UTR with at least 85%, at least 90%, or at least 95% identity to any one of SEQ ID NOs: 406-413; or
c. a 5′ cap, optionally wherein the 5′ cap is Cap0, Cap1, or Cap2.

51. The polynucleotide, composition or lipid nanoparticles of any one of claims 30-50, wherein the polynucleotide is an mRNA.

52. The polynucleotide, composition or lipid nanoparticles of any one of claims 30-51, wherein at least 85% of the uridine is substituted with a modified uridine.

53. The method, composition, or lipid nanoparticles of any one of claims 1-52, wherein one or more of the nucleic acids encoding the fusion protein, the first guide RNA, and the second guide RNA are associated with one or more lipid nanoparticle (LNP).

54. The method, composition, or lipid nanoparticles of any one of claims 1-53, wherein
a. the nucleic acids encoding the fusion protein are each associated with a separate lipid nanoparticle (LNP);
b. the first guide RNA and the second guide RNA are associated with a same lipid nanoparticle (LNP); or
c. all of the nucleic acids encoding the fusion protein, the first guide RNA, and the second guide RNA are associated with a same lipid nanoparticle.

55. The method, composition or lipid nanoparticles of any one of claims 53-54, wherein the LNP comprises (i) an ionizable lipid; (ii) a helper lipid; (iii) a stealth lipid; (iv) a neutral lipid; or combinations of one or more of (i)-(iv), optionally wherein:
a. the ionizable lipid is (9Z,12Z)-3-((4,4-bis(octyloxy)butanoyl)oxy)-2-((((3-(diethylamino)propoxy)carbonyl)oxy)methyl)propyl octadeca-9,12-dienoate, also called 3-((4,4-bis(octyloxy)butanoyl)oxy)-2-((((3-(diethylamino)propoxy)carbonyl)oxy)methyl)propyl (9Z,12Z)-octadeca-9,12-dienoate;
b. the helper lipid is cholesterol;
c. the stealth lipid is PEG-DMG; or
d. the neutral lipid is DSPC.

56. The method, composition, or lipid nanoparticles of any one of claims 53-55, wherein the PEG-DMG is 1,2-dimyristoyl-rac-glycero-3-methoxypolyethylene glycol-2000 (PEG2k-DMG).

57. The method, composition, or lipid nanoparticles of any one of claims 53-56, wherein the LNP composition comprises about 50 mol-% ionizable lipid; about 9 mol-% neutral lipid; about 3 mol-% of stealth lipid, and the remainder of the lipid component is helper lipid such as cholesterol.

58. The method, composition, or lipid nanoparticles of any one of claims 53-57, wherein the LNP comprises (9Z,12Z)-3-((4,4-bis(octyloxy)butanoyl)oxy)-2-((((3-(diethylamino)propoxy)carbonyl)oxy)methyl)propyl octadeca-9,12-dienoate, also called 3-((4,4-bis(octyloxy)butanoyl)oxy)-2-((((3-(diethylamino)propoxy)carbonyl)oxy)methyl)propyl (9Z,12Z)-octadeca-9,12-dienoate, DSPC, cholesterol, and PEG2k-DMG.

59. A polypeptide encoded by the polynucleotide of any one of claims 30-52.

60. A vector comprising a sequence encoding the polynucleotide of any one of claims 30-52 or an expression construct comprising a promoter operably linked to a sequence encoding the polynucleotide of any one of claims 30-52, optionally wherein the expression construct is in a plasmid.

61. A host cell comprising the vector or expression construct of claim 60.

62. A pharmaceutical composition comprising the polynucleotide, composition, lipid nanoparticle, or polypeptide of any one of claims 30-59, and a pharmaceutically acceptable carrier.

63. A kit comprising the polynucleotide, composition, or polypeptide of any one of claims 30-59.

64. Use of the polynucleotide, composition, lipid nanoparticle or polypeptide any one of claims 30-59 for producing a modification in the genome of a target cell.

65. Use of the polynucleotide, composition, lipid nanoparticle or polypeptide any one of claims 30-59 for the manufacture of a medicament for producing a modification in the genome of a target cell.

66. The method or composition of any one of claims 1-27, 31, and 33-58, wherein one or more of the nucleic acids encoding the fusion protein, the first guide RNA, and the second guide RNA are associated with one or more targeted LNP.

67. The method or composition of claim 66, wherein the targeted LNP is targeted to one or more of the brain, eye, muscle, liver, lung, spleen, and bone marrow.

68. The method or composition of any one of claims 66-67, wherein the targeted LNP comprises a targeting lipid component or a targeting domain.

69. The method or composition of claim 68, wherein the targeting domain comprises a nucleic acid, peptide, antibody, small molecule, glycan, sugar, or hormone.

70. The method of any one of claims 66-69, wherein the targeted LNP is administered by a delivery route of intravenous, intradermal, subcutaneous, inhalation, intranasal, or intramuscular delivery.
